(19) United States
(12) Patent Application Publication
(10) Pub. No.: US 2020/0332306 A1
(43) Pub. Date: Oct. 22, 2020

(54) TYPE I-E CRISPR-CAS SYSTEMS FOR EUKARYOTIC GENOME EDITING

(71) Applicant: PIONEER HI-BRED INTERNATIONAL, INC., JOHNSTON, IA (US)

(72) Inventors: STEPHEN LAWRENCE GASIOR, JOHNSTON, IA (US); JOSHUA K YOUNG, JOHNSTON, IA (US)

(73) Assignee: PIONEER HI-BRED INTERNATIONAL, INC., JOHNSTON, IA (US)

(21) Appl. No.: 16/754,090

(22) PCT Filed: Oct. 8, 2018
(86) PCT No.: PCT/US18/54856

§ 371 Date: Apr. 6, 2020

Related U.S. Application Data
(60) Provisional application No. 62/569,836, filed on Oct. 9, 2017.
(60) Provisional application No. 62/639,791, filed on Mar. 7, 2018.
(60) Provisional application No. 62/670,434, filed on May 11, 2018.
(60) Provisional application No. 62/693,533, filed on Jul. 3, 2018.

(51) Int. Cl. C12N 15/82; C12N 9/22

(52) U.S. Cl. CPC C12N 15/8213; C12N 2310/20; C12N 9/22; C12N 15/8205

(57) ABSTRACT

Compositions and methods are provided for modification of a target sequence in the genome of a cell. The methods and compositions employ a cascade system and guide polynucleotide to provide an effective system for targeting, binding to, and modifying or altering target sequences within the genome of a cell or organism. Also provided are systems further comprising an endonuclease. Compositions and methods are also provided for guide polynucleotide/endonuclease systems comprising at least one nuclease covalently or non-covalently linked to, or assembled with, at least one protein subunit of a cascade, and for compositions and methods for direct delivery of endonucleases.

### CROSS-REFERENCE TO RELATED APPLICATION

[0001] This application is a 371 National Stage application of PCT application number PCT/US2018/054856 filed on 8 Oct. 2018, which claims the benefit of U.S. Provisional Patent Application Ser. No. 62/569,836 filed 9 Oct. 2017, U.S. Provisional Patent Application Ser. No. 62/639,791 filed 7 Mar. 2018, U.S. Provisional Patent Application Ser. No. 62/670,434 filed 11 May 2018, and U.S. Provisional Patent Application Ser. No. 62/693,533 filed 3 Jul. 2018, all of which are herein incorporated by reference in their entireties.

### FIELD OF THE INVENTION

[0002] The disclosure relates to the field of molecular biology, in particular to compositions of guide polynucleotide/endonuclease systems, and compositions and methods for modifying the genome of a cell.

### REFERENCE TO SEQUENCE LISTING SUBMITTED ELECTRONICALLY

[0003] The official copy of the sequence listing is submitted electronically via EFS-Web as an ASCII formatted sequence listing with a file named 7468-US-PCT_SequenceListing_ST25.TXT created on 27 Mar. 2020 and having a size of 751,565 bytes and is filed concurrently with the specification. The sequence listing comprised in this ASCII formatted document is part of the specification and is herein incorporated by reference in its entirety.

### BACKGROUND

[0004] Recombinant DNA technology has made it possible to insert DNA sequences at targeted genomic locations and/or modify specific endogenous chromosomal sequences. Site-specific integration techniques, which employ site-specific recombination systems, as well as other types of recombination technologies, have been used to generate targeted insertions of genes of interest in a variety of organism. Genome-editing techniques such as designer zinc finger nucleases (ZFNs), transcription activator-like effector nucleases (TALENs), or homing meganucleases, are available for producing targeted genome perturbations, but these systems tend to have low specificity and employ designed nucleases that need to be redesigned for each target site, which renders them costly and time-consuming to prepare.

[0005] Newer technologies utilizing archaeal or bacterial adaptive immunity systems have been identified, called CRISPR (Clustered Regularly Interspaced Short Palindromic Repeats), which comprise different domains of effector proteins that encompass a variety of activities (DNA recognition, binding, and optionally cleavage).

[0006] Despite the identification and characterization of some of these systems, there remains a need for identifying novel effectors and systems, as well as demonstrating activity in eukaryotes, particularly animals and plants, to effect editing of endogenous and previously-introduced heterologous polynucleotides.

### SUMMARY

[0007] Methods and compositions are provided for the modification of a target polynucleotide sequence, for example in the genome of a cell, for example in the genome of a plant cell, through the usage of a Type I-E CRISPR Cascade system. In some aspects, a guide RNA directs one or more components to a target polynucleotide. The guide RNA may be expressed under control of a heterologous regulatory element, for example a polII or polIII promoter. Multiple guide RNAs may be expressed from a single promoter. The target polynucleotide may be modified by the insertion of one or more nucleotides, deletion of one or more nucleotides, substitution of one or more nucleotides, chemical modification of one or more nucleotides, or any combination of the preceding.

[0008] In some aspects, the target polynucleotide is a gene, that may be activated or deactivated as the result of the target site modification.

[0009] In some aspects, the target site polynucleotide modification may involve the usage of one, two, three, four, five, or more than five components of a Cascade. In some aspects, one or more components of the Cascade may be fused to another polypeptide, for example a nuclease or a transcriptional activator. In some aspects, a synergistic effect is achieved by fusing the same or different polypeptide domains to different components of the Cascade and/or the endonuclease.

[0010] In some aspects, targeted cleavage is achieved through the use of a Type I-E Cascade that is associated with a molecule capable of introducing a single-strand nick or a double-strand break to a polynucleotide sequence at a target site, such as Cas3 nuclease or Cas3 nickase or Fok1 or I-Tevi. A Ias3 nickase, when recruited by a Type I-E cleavage cascade, may nick either or both strands of a double-strand target, creating one nick on one strand or one nick on both strands, resulting in either a nick or a double-strand break. The double-strand break may comprise a 5′ overhang, a 3′ overhang, a blunt end cut, or a blunt end cut plus overhangs. In some aspects, the Cas3 nickase works in a cooperative manner, that is, the nickase nicks one strand of a double stranded polynucleotide and nicks the opposite strand of the same double stranded polynucleotide, to create a double-strand break, by virtue of the cooperative nicks on the two strands.

[0011] In one aspect, the invention provides a method for forming a CRISPR cascade and guide polynucleotide complex in a plant cell, comprising providing to said plant cell: a Cse1 polypeptide, and a guide polynucleotide comprising a variable targeting domain that is substantially complementary to a polynucleotide target sequence in the genome of the plant cell; and incubating said plant cell; wherein said Cse1 polypeptide functionally associates with at least one other protein to form a cascade; and wherein the guide polynucleotide and cascade form a complex capable of recognizing and binding to the polynucleotide target sequence in the genome of the plant cell.

[0012] In one aspect, the invention provides a method for forming a CRISPR cascade and guide polynucleotide complex in a plant cell, comprising providing to said plant cell: a cse1 polynucleotide, and a guide polynucleotide comprising a variable targeting domain that is substantially complementary to a polynucleotide target sequence in the genome of said plant cell; and incubating said cell; wherein said cse1 polynucleotide is operably linked to a noncoding regulatory element rendering it capable of expressing a Cse1 polypeptide, and wherein said Cse1 polypeptide functionally associates with at least one other protein to form a cascade; and wherein said cascade and guide polynucleotide form a complex capable of recognizing and binding to a polynucleotide target sequence in the genome of said plant cell.

[0013] In any aspect of any of the methods comprising Cas5, Cash, or Cas8, the invention optionally provides the Cas protein linked to a heterologous polypeptide, wherein said heterologous polypeptide is capable of a function selected from the group consisting of: transcription repression, transcription modulation, transcription activation, polynucleotide methylation, polynucleotide demethylation, polynucleotide cleavage, polynucleotide nicking, deamination, and a combination thereof.

[0014] In any aspect of any of the methods comprising Cas5, Cash, or Cas8, the invention optionally provides the Cas protein linked to a heterologous polypeptide, wherein said Cas protein and said heterologous polypeptide are linked at the C-terminal end of the Cas protein. In some aspects, the Cas5 and the heterologous polypeptide are linked by 1, 2, 3, 4, 5, 6, 7, 8, 9, 10, 11, 12, 13, 14, 15, 16, 17, 18, 19, 20, 21, 22, 23, 24, 25, or greater than 25 amino acids.

[0015] In some aspects, the Cascade and guide polynucleotide form a complex capable of recognizing and binding to a polynucleotide target sequence in the genome of said plant cell; wherein one, two, three, or four polynucleotide(s) selected from the group consisting of: cse2, cas7, cas5, and cash is(are) further introduced into said plant cell. In some aspects, the complex may nick, cleave, or edit at least one nucleotide of the target polynucleotide.

[0016] In some aspects, the introduction of any component into the target cell is via a method selected from the group consisting of: Agrobacterium-mediated transformation, particle bombardment, and floral dip.

[0017] In some aspects, the plant cell is incubated at a temperature of 28 degrees Celsius, between 28 and 29, 29, between 29 and 30, 30, between 30 and 31, 31, between 31 and 32, 32, between 32 and 33, 33, between 33 and 34, 34, between 34 and 35, 35, between 35 and 36, 36, between 36 and 37, 37, or greater than 37 degrees Celsius, for at least 0.5, 1, 2, 3, 4, or greater than 4 hours.

[0018] In some aspects, the plant cell further comprises a guide polynucleotide comprising a sequence substantially complementary to a sequence within the genome of said plant cell.

[0019] In some aspects, the said plant cell comprises an endonuclease. In some aspects, said endonuclease is Cas3, or a functional fragment or variant thereof. In some aspects, said endonuclease is a fusion protein comprising at least one functional endonuclease domain.

[0020] In some aspects, the method or composition further comprising at least one of the components provided to said plant cell comprising the capability of nicking or cleaving at least one strand of the polynucleotide target sequence. In some aspects, the method or composition further comprises editing at least one base of the polynucleotide target sequence.

[0021] In some aspects, said plant cell is a monocot plant cell. In some aspects, said monocot plant cell is obtained or derived from a plant selected from the group consisting of: corn (Zea mays), rice (Oryza sativa), rye (Secale cereale), sorghum (Sorghum bicolor, Sorghum vulgare), millet (e.g., pearl millet (Pennisetum glaucum), proso millet (Panicum miliaceum), foxtail millet (Setaria italica), finger millet (Eleusine coracana)), wheat (Triticum species, for example Triticum aestivum, Triticum monococcum), sugarcane (Saccharum spp.), oats (Avena), barley (Hordeum), switchgrass (Panicum virgatum), pineapple (Ananas comosus), banana (Musa spp.), palm, ornamentals, turfgrasses, and other grasses.

[0022] In some aspects, said plant cell is a dicot plant cell. In some aspects, said dicot plant cell is obtained or derived from a plant selected from the group consisting of: soybean (Glycine max), Brassica species (for example but not limited to: oilseed rape or Canola) (Brassica napus, B. campestris, Brassica rapa, Brassica juncea), alfalfa (Medicago sativa), tobacco (Nicotiana tabacum), Arabidopsis (Arabidopsis thaliana), sunflower (Helianthus annuus), cotton (Gossypium arboreum, Gossypium barbadense), and peanut (Arachis hypogaea), tomato (Solanum lycopersicum), and potato (Solanum tuberosum).

[0023] In some aspects, the method further comprises placing the plant cell in a medium that promotes growth, generating a plant from the plant cell, and screening said plant for a trait of interest;

[0024] In some aspects, the said Cse1 polypeptide or cse1 polynucleotide is derived from a host organism comprising a Type I-E CRISPR system.

[0025] In some aspects, the cse1 polynucleotide is operably linked to a noncoding regulatory element rendering it capable of expressing a Cse1 polypeptide that functionally associates with at least one other protein to form a cascade

[0026] In some aspects, the said cascade further comprises at least one, at least two, at least three, or four protein(s) selected from the group consisting of: Cse2, Cas7, Cas5, and Cas6.

[0027] In some aspects, the Cas5, Cas6, or Cas8 is linked to a heterologous polypeptide, wherein said heterologous polypeptide is capable of a function selected from the group consisting of: transcription repression, transcription modulation, transcription activation, polynucleotide methylation, polynucleotide demethylation, polynucleotide cleavage, polynucleotide nicking, deamination, and a combination thereof.

[0028] In some aspects, the Cas5, Cas6, or Cas8 is linked to a heterologous polypeptide, wherein said heterologous polypeptide is capable of a function selected from the group consisting of: transcription repression, transcription modulation, transcription activation, polynucleotide methylation, polynucleotide demethylation, polynucleotide cleavage, polynucleotide nicking, deamination, and a combination thereof; wherein the heterologous polynucleotide is linked to the C-terminal end of the Cas protein, optionally via a linker of at least 1, 2, 3, 4, 5, 6, 7, 8, 9 10, 11, 12, 13, 14, 15, 16, 17, 18, 19, 20, 21, 22, 23, 24, 25, or greater than 25 amino acids.

[0029] In some aspects, the at least one, two three, or four additional polynucleotides is further introduced into said plant cell, said additional polynucleotides selected from the group consisting of: cse2, cas7, cas5, and cas6.

[0030] In some aspects, at least one of the components is introduced into said plant cell via a recombinant DNA construct.

[0031] In some aspects, at least one of the components has been optimized for expression in said plant cell.

[0032] In some aspects, the introduction into said plant cell is achieved via a method selected from the group consisting of: Agrobacterium-mediated transformation, particle bombardment, and floral dip.

[0033] In some aspects, the plant cell is incubated at a temperature of greater than 25, 26, 27, 28, 29, 30, 31, 32, 33, 34, 35, or greater than 35 degrees Celsius.

[0034] In some aspects, the plant cell comprises an endonuclease. In some aspects, said endonuclease is Cas3, or a functional fragment or variant thereof In some aspects, said endonuclease is a fusion protein comprising at least one functional endonuclease domain.

[0035] In one aspect, the invention provides a whole organism, an organism part, an organism element, a tissue, a plurality of cells, a single cell, or a composition derived from one of the following: (a) a synthetic composition comprising: a plant cell, a guide polynucleotide comprising a variable targeting domain that is substantially complementary to a polynucleotide target sequence in the genome of said plant cell, an endonuclease, and a cascade comprising a Cse1 polypeptide; wherein said cascade forms a complex with the guide polynucleotide and the endonuclease; and wherein the complex is capable of recognizing, binding to, and nicking or cleaving at least one strand of a polynucleotide target sequence in the genome of said plant cell; or (b) a synthetic composition comprising: a plant cell, a guide polynucleotide comprising a variable targeting domain that is substantially complementary to a polynucleotide target sequence in the genome of said plant cell, an endonuclease, and a cse1 polynucleotide; wherein said cse1 polynucleotide is operably linked to a noncoding regulatory element rendering it capable of expressing a Cse1 polypeptide that functionally associates with at least one other protein to form a cascade; wherein said cascade forms a complex with the guide polynucleotide and the endonuclease; and wherein the complex is capable of recognizing, binding to, and nicking or cleaving at least one strand of a polynucleotide target sequence in the genome of said plant cell.

[0036] In one aspect, the invention provides an organism, progeny, or tissue derived from one of the following: (a) a synthetic composition comprising: a plant cell, a guide polynucleotide comprising a variable targeting domain that is substantially complementary to a polynucleotide target sequence in the genome of said plant cell, an endonuclease, and a cascade comprising a Cse1 polypeptide; wherein said cascade forms a complex with the guide polynucleotide and the endonuclease; and wherein the complex is capable of recognizing, binding to, and nicking or cleaving at least one strand of a polynucleotide target sequence in the genome of said plant cell; or (b) a synthetic composition comprising: a plant cell, a guide polynucleotide comprising a variable targeting domain that is substantially complementary to a polynucleotide target sequence in the genome of said plant cell, an endonuclease, and a cse1 polynucleotide; wherein said cse1 polynucleotide is operably linked to a noncoding regulatory element rendering it capable of expressing a Cse1 polypeptide that functionally associates with at least one other protein to form a cascade; wherein said cascade forms a complex with the guide polynucleotide and the endonuclease; and wherein the complex is capable of recognizing, binding to, and nicking or cleaving at least one strand of a polynucleotide target sequence in the genome of said plant cell.

[0037] In one aspect, the invention provides any of the following synthetic compositions: (a) a synthetic composition comprising: a plant cell, a guide polynucleotide comprising a variable targeting domain that is substantially complementary to a polynucleotide target sequence in the genome of said plant cell, an endonuclease, and a cascade comprising a Cse1 polypeptide; wherein said cascade forms a complex with the guide polynucleotide and the endonuclease; and wherein the complex is capable of recognizing, binding to, and nicking or cleaving at least one strand of a polynucleotide target sequence in the genome of said plant cell; or (b) a synthetic composition comprising: a plant cell, a guide polynucleotide comprising a variable targeting domain that is substantially complementary to a polynucleotide target sequence in the genome of said plant cell, an endonuclease, and a cse1 polynucleotide; wherein said cse1 polynucleotide is operably linked to a noncoding regulatory element rendering it capable of expressing a Cse1 polypeptide that functionally associates with at least one other protein to form a cascade; wherein said cascade forms a complex with the guide polynucleotide and the endonuclease; and wherein the complex is capable of recognizing, binding to, and nicking or cleaving at least one strand of a polynucleotide target sequence in the genome of said plant cell; wherein said cascade is a Type I-E CRISPR cascade.

[0038] In one aspect, the invention provides a synthetic composition comprising a Cas5 protein and a heterologous polypeptide, wherein said heterologous polypeptide is capable of a function selected from the group consisting of: transcription repression, transcription modulation, transcription activation, polynucleotide methylation, polynucleotide demethylation, polynucleotide cleavage, polynucleotide nicking, deamination, and a combination thereof.

[0039] In one aspect, the invention provides a synthetic composition comprising a Cas5 protein and a heterologous polypeptide, wherein said heterologous polypeptide is capable of a function selected from the group consisting of: transcription repression, transcription modulation, transcription activation, polynucleotide methylation, polynucleotide demethylation, polynucleotide cleavage, polynucleotide nicking, deamination, and a combination thereof; wherein said Cas5 protein and said heterologous polynucleotide are linked at the 5-prime end of Cas 5.

[0040] In any aspect of the invention, Cas5 is a polypeptide sequence shares at least 50%, between 50% and 55%, at least 55%, between 55% and 60%, at least 60%, between 60% and 65%, at least 65%, between 65% and 70%, at least 70%, between 70% and 75%, at least 75%, between 75% and 80%, at least 80%, between 80% and 85%, at least 85%, between 85% and 90%, at least 90%, between 90% and 95%, at least 95%, between 95% and 96%, at least 96%, between 96% and 97%, at least 97%, between 97% and 98%, at least 98%, between 98% and 99%, at least 99%, between 99% and 100%, or 100% sequence identity with at least 50, between 50 and 100, at least 100, between 100 and 150, at least 150, between 150 and 175, at least 175, between 175 and 195, or greater than 195 contiguous amino acids of SEQ ID NO:10. In any aspect, Cas5 is a polypeptide encoded by a polynucleotide sequence that shares at least 50%, between 50% and 55%, at least 55%, between 55% and 60%, at least 60%, between 60% and 65%, at least 65%, between 65% and 70%, at least 70%, between 70% and 75%, at least 75%, between 75% and 80%, at least 80%, between 80% and 85%, at least 85%, between 85% and 90%, at least 90%, between 90% and 95%, at least 95%, between 95% and 96%, at least 96%, between 96% and 97%, at least 97%, between 97% and 98%, at least 98%, between 98% and 99%, at least 99%, between 99% and 100%, or 100% sequence identity with at least 50, between 50 and 100, at least 100, between 100 and 150, at least 150, between 150 and 200, at least 200, between 200 and 250, at least 250, between 250 and 300, at least 300, between 300 and 350, at least 350, between 350 and 400, at least 400, between 400 and 450, or greater than 450 contiguous nucleotides SEQ ID NO:2.

[0041] In any aspect of the invention, Cas6 is a polypeptide sequence shares at least 50%, between 50% and 55%, at least 55%, between 55% and 60%, at least 60%, between 60% and 65%, at least 65%, between 65% and 70%, at least 70%, between 70% and 75%, at least 75%, between 75% and 80%, at least 80%, between 80% and 85%, at least 85%, between 85% and 90%, at least 90%, between 90% and 95%, at least 95%, between 95% and 96%, at least 96%, between 96% and 97%, at least 97%, between 97% and 98%, at least 98%, between 98% and 99%, at least 99%, between 99% and 100%, or 100% sequence identity with at least 50, between 50 and 100, at least 100, between 100 and 150, at least 150, between 150 and 175, at least 175, between 175 and 195, or greater than 195 contiguous amino acids of SEQ ID NO:11. In any aspect, Cas6 is a polypeptide encoded by a polynucleotide sequence that shares at least 50%, between 50% and 55%, at least 55%, between 55% and 60%, at least 60%, between 60% and 65%, at least 65%, between 65% and 70%, at least 70%, between 70% and 75%, at least 75%, between 75% and 80%, at least 80%, between 80% and 85%, at least 85%, between 85% and 90%, at least 90%, between 90% and 95%, at least 95%, between 95% and 96%, at least 96%, between 96% and 97%, at least 97%, between 97% and 98%, at least 98%, between 98% and 99%, at least 99%, between 99% and 100%, or 100% sequence identity with at least 50, between 50 and 100, at least 100, between 100 and 150, at least 150, between 150 and 200, at least 200, between 200 and 250, at least 250, between 250 and 300, at least 300, between 300 and 350, at least 350, between 350 and 400, at least 400, between 400 and 450, or greater than 450 contiguous nucleotides SEQ ID NO:3.

[0042] In any aspect of the invention, Cas7 is a polypeptide sequence shares at least 50%, between 50% and 55%, at least 55%, between 55% and 60%, at least 60%, between 60% and 65%, at least 65%, between 65% and 70%, at least 70%, between 70% and 75%, at least 75%, between 75% and 80%, at least 80%, between 80% and 85%, at least 85%, between 85% and 90%, at least 90%, between 90% and 95%, at least 95%, between 95% and 96%, at least 96%, between 96% and 97%, at least 97%, between 97% and 98%, at least 98%, between 98% and 99%, at least 99%, between 99% and 100%, or 100% sequence identity with at least 50, between 50 and 100, at least 100, between 100 and 150, at least 150, between 150 and 175, at least 175, between 175 and 195, or greater than 195 contiguous amino acids of SEQ ID NO:12. In any aspect, Cas7 is a polypeptide encoded by a polynucleotide sequence that shares at least 50%, between 50% and 55%, at least 55%, between 55% and 60%, at least 60%, between 60% and 65%, at least 65%, between 65% and 70%, at least 70%, between 70% and 75%, at least 75%, between 75% and 80%, at least 80%, between 80% and 85%, at least 85%, between 85% and 90%, at least 90%, between 90% and 95%, at least 95%, between 95% and 96%, at least 96%, between 96% and 97%, at least 97%, between 97% and 98%, at least 98%, between 98% and 99%, at least 99%, between 99% and 100%, or 100% sequence identity with at least 50, between 50 and 100, at least 100, between 100 and 150, at least 150, between 150 and 200, at least 200, between 200 and 250, at least 250, between 250 and 300, at least 300, between 300 and 350, at least 350, between 350 and 400, at least 400, between 400 and 450, or greater than 450 contiguous nucleotides SEQ ID NO:4.

[0043] In any aspect of the invention, Cse1 is a polypeptide sequence shares at least 50%, between 50% and 55%, at least 55%, between 55% and 60%, at least 60%, between 60% and 65%, at least 65%, between 65% and 70%, at least 70%, between 70% and 75%, at least 75%, between 75% and 80%, at least 80%, between 80% and 85%, at least 85%, between 85% and 90%, at least 90%, between 90% and 95%, at least 95%, between 95% and 96%, at least 96%, between 96% and 97%, at least 97%, between 97% and 98%, at least 98%, between 98% and 99%, at least 99%, between 99% and 100%, or 100% sequence identity with at least 50, between 50 and 100, at least 100, between 100 and 150, at least 150, between 150 and 175, at least 175, between 175 and 195, or greater than 195 contiguous amino acids of SEQ ID NO:13. In any aspect, Cse1 is a polypeptide encoded by a polynucleotide sequence that shares at least 50%, between 50% and 55%, at least 55%, between 55% and 60%, at least 60%, between 60% and 65%, at least 65%, between 65% and 70%, at least 70%, between 70% and 75%, at least 75%, between 75% and 80%, at least 80%, between 80% and 85%, at least 85%, between 85% and 90%, at least 90%, between 90% and 95%, at least 95%, between 95% and 96%, at least 96%, between 96% and 97%, at least 97%, between 97% and 98%, at least 98%, between 98% and 99%, at least 99%, between 99% and 100%, or 100% sequence identity with at least 50, between 50 and 100, at least 100, between 100 and 150, at least 150, between 150 and 200, at least 200, between 200 and 250, at least 250, between 250 and 300, at least 300, between 300 and 350, at least 350, between 350 and 400, at least 400, between 400 and 450, or greater than 450 contiguous nucleotides SEQ ID NO:5.

[0044] In any aspect of the invention, Cse2 is a polypeptide sequence shares at least 50%, between 50% and 55%, at least 55%, between 55% and 60%, at least 60%, between 60% and 65%, at least 65%, between 65% and 70%, at least 70%, between 70% and 75%, at least 75%, between 75% and 80%, at least 80%, between 80% and 85%, at least 85%, between 85% and 90%, at least 90%, between 90% and 95%, at least 95%, between 95% and 96%, at least 96%, between 96% and 97%, at least 97%, between 97% and 98%, at least 98%, between 98% and 99%, at least 99%, between 99% and 100%, or 100% sequence identity with at least 50, between 50 and 100, at least 100, between 100 and 150, at least 150, between 150 and 175, at least 175, between 175 and 195, or greater than 195 contiguous amino acids of SEQ ID NO:14. In any aspect, Cse2 is a polypeptide encoded by a polynucleotide sequence that shares at least 50%, between 50% and 55%, at least 55%, between 55% and 60%, at least 60%, between 60% and 65%, at least 65%, between 65% and 70%, at least 70%, between 70% and 75%, at least 75%, between 75% and 80%, at least 80%, between 80% and 85%, at least 85%, between 85% and 90%, at least 90%, between 90% and 95%, at least 95%, between 95% and 96%, at least 96%, between 96% and 97%, at least 97%, between 97% and 98%, at least 98%, between 98% and 99%, at least 99%, between 99% and 100%, or 100% sequence identity with at least 50, between 50 and 100, at least 100, between 100 and 150, at least 150, between 150 and 200, at least 200, between 200 and 250, at least 250, between 250 and 300, at least 300, between 300 and 350, at least 350, between 350 and 400, at least 400, between 400 and 450, or greater than 450 contiguous nucleotides SEQ ID NO:6.

[0045] In any aspect of the invention, Cas1 is a polypeptide sequence shares at least 50%, between 50% and 55%, at least 55%, between 55% and 60%, at least 60%, between 60% and 65%, at least 65%, between 65% and 70%, at least 70%, between 70% and 75%, at least 75%, between 75% and 80%, at least 80%, between 80% and 85%, at least 85%, between 85% and 90%, at least 90%, between 90% and 95%, at least 95%, between 95% and 96%, at least 96%, between 96% and 97%, at least 97%, between 97% and 98%, at least 98%, between 98% and 99%, at least 99%, between 99% and 100%, or 100% sequence identity with at least 50, between 50 and 100, at least 100, between 100 and 150, at least 150, between 150 and 175, at least 175, between 175 and 195, or greater than 195 contiguous amino acids of SEQ ID NO:16. In any aspect, Cas1 is a polypeptide encoded by a polynucleotide sequence that shares at least 50%, between 50% and 55%, at least 55%, between 55% and 60%, at least 60%, between 60% and 65%, at least 65%, between 65% and 70%, at least 70%, between 70% and 75%, at least 75%, between 75% and 80%, at least 80%, between 80% and 85%, at least 85%, between 85% and 90%, at least 90%, between 90% and 95%, at least 95%, between 95% and 96%, at least 96%, between 96% and 97%, at least 97%, between 97% and 98%, at least 98%, between 98% and 99%, at least 99%, between 99% and 100%, or 100% sequence identity with at least 50, between 50 and 100, at least 100, between 100 and 150, at least 150, between 150 and 200, at least 200, between 200 and 250, at least 250, between 250 and 300, at least 300, between 300 and 350, at least 350, between 350 and 400, at least 400, between 400 and 450, or greater than 450 contiguous nucleotides SEQ ID NO:8.

[0046] In any aspect of the invention, Cas2 is a polypeptide sequence shares at least 50%, between 50% and 55%, at least 55%, between 55% and 60%, at least 60%, between 60% and 65%, at least 65%, between 65% and 70%, at least 70%, between 70% and 75%, at least 75%, between 75% and 80%, at least 80%, between 80% and 85%, at least 85%, between 85% and 90%, at least 90%, between 90% and 95%, at least 95%, between 95% and 96%, at least 96%, between 96% and 97%, at least 97%, between 97% and 98%, at least 98%, between 98% and 99%, at least 99%, between 99% and 100%, or 100% sequence identity with at least 50, between 50 and 100, at least 100, between 100 and 150, at least 150, between 150 and 175, at least 175, between 175 and 195, or greater than 195 contiguous amino acids of SEQ ID NO:17. In any aspect, Cas2 is a polypeptide encoded by a polynucleotide sequence that shares at least 50%, between 50% and 55%, at least 55%, between 55% and 60%, at least 60%, between 60% and 65%, at least 65%, between 65% and 70%, at least 70%, between 70% and 75%, at least 75%, between 75% and 80%, at least 80%, between 80% and 85%, at least 85%, between 85% and 90%, at least 90%, between 90% and 95%, at least 95%, between 95% and 96%, at least 96%, between 96% and 97%, at least 97%, between 97% and 98%, at least 98%, between 98% and 99%, at least 99%, between 99% and 100%, or 100% sequence identity with at least 50, between 50 and 100, at least 100, between 100 and 150, at least 150, between 150 and 200, at least 200, between 200 and 250, at least 250, between 250 and 300, at least 300, between 300 and 350, at least 350, between 350 and 400, at least 400, between 400 and 450, or greater than 450 contiguous nucleotides SEQ ID NO:9.

[0047] In any aspect of the invention, Cas3 is a polypeptide sequence shares at least 50%, between 50% and 55%, at least 55%, between 55% and 60%, at least 60%, between 60% and 65%, at least 65%, between 65% and 70%, at least 70%, between 70% and 75%, at least 75%, between 75% and 80%, at least 80%, between 80% and 85%, at least 85%, between 85% and 90%, at least 90%, between 90% and 95%, at least 95%, between 95% and 96%, at least 96%, between 96% and 97%, at least 97%, between 97% and 98%, at least 98%, between 98% and 99%, at least 99%, between 99% and 100%, or 100% sequence identity with at least 50, between 50 and 100, at least 100, between 100 and 150, at least 150, between 150 and 175, at least 175, between 175 and 195, or greater than 195 contiguous amino acids of SEQ ID NO:15. In any aspect, Cas3 is a polypeptide encoded by a polynucleotide sequence that shares at least 50%, between 50% and 55%, at least 55%, between 55% and 60%, at least 60%, between 60% and 65%, at least 65%, between 65% and 70%, at least 70%, between 70% and 75%, at least 75%, between 75% and 80%, at least 80%, between 80% and 85%, at least 85%, between 85% and 90%, at least 90%, between 90% and 95%, at least 95%, between 95% and 96%, at least 96%, between 96% and 97%, at least 97%, between 97% and 98%, at least 98%, between 98% and 99%, at least 99%, between 99% and 100%, or 100% sequence identity with at least 50, between 50 and 100, at least 100, between 100 and 150, at least 150, between 150 and 200, at least 200, between 200 and 250, at least 250, between 250 and 300, at least 300, between 300 and 350, at least 350, between 350 and 400, at least 400, between 400 and 450, or greater than 450 contiguous nucleotides SEQ ID NO:7.

[0048] In any aspect, any component may be provided to the plant cell as a polynucleotide or a polypeptide. In some aspects, a combination of polynucleotide and polypeptide components may be provided.

### BRIEF DESCRIPTION OF THE DRAWINGS AND THE SEQUENCES

[0049] The disclosure can be more fully understood from the following detailed description and the accompanying drawings and Sequence Listing, which form a part of this application. The sequence descriptions and sequence listing attached hereto comply with the rules governing nucleotide and amino acid sequence disclosures in patent applications as set forth in 37 C.F.R. §§1.821 and 1.825. The sequence descriptions comprise the three letter codes for amino acids as defined in 37 C.F.R. §§ 1.821 and 1.825, which are incorporated herein by reference.

[0050] FIG. 1 depicts the locus architecture and operon structure of a typical Type I-E CRISPR-Cas system, comprising genes encoding Cas3, Cse1, Cse2, Cas7, Cas5, Cas6, Cas1, and Cas2, followed by a CRISPR array comprising repeats and spacers.

[0051] FIG. 2 depicts the components of a recombinant expression cassette comprising a cascade gen.

[0052] FIG. 3A depicts the cas5 gene linked at its 5′ end to a Nuclear Localization Sequence (NLS) and an activation motif (AtCBF1). FIG. 3B depicts the cas5 gene linked at its 3′ end to a Nuclear Localization Sequence (NLS) and an activation motif (AtCBF1).

[0053] FIG. 4 depicts the cse1 gene linked at its 5′ end to a Nuclear Localization Sequence (NLS) and an activation motif (AtCBF1).

[0054] FIG. 5A depicts the components of a recombinant expression cassette comprising a Cas gene (cas5 or cse1) fused at its 5-prime end via a linker sequence to an AtCBF1 transcriptional activator, operably linked to a maize ubiquitin promoter, maize ubiquitin 5-prime UTR, and maize ubiquitin intron, and further comprising a terminator sequence.

[0055] FIG. 5B depicts the components of a recombinant expression cassette comprising a Cas gene (cas5 or dcas9) fused at its 3-prime end via a linker sequence to an AtCBF1 transcriptional activator, operably linked to a maize ubiquitin promoter, maize ubiquitin 5-prime UTR, and maize ubiquitin intron, and further comprising a terminator sequence.

[0056] FIG. 6 depicts primary CRISPR array transcript architecture, and cleavage by an endonuclease (as one example, Cas6 is shown in the figure), to generate small CRISPR RNAs (guide RNAs).

[0057] FIG. 7 depicts a CRISPR array-like arrangement of Variable targeting domains comprising maize sequences interspersed with repeat sequences, operably linked to a U6 PolIII promoter and a U6 PolIII terminator.

[0058] FIG. 8 depicts a recombinant expression cassette comprising a maize UBI promoter, maize UBI 5-prime UTR, and maize UBI intron 1 operably linked to a CRISPR array, followed by a PolII terminator.

[0059] FIG. 9 depicts the key elements of a gene activation (GACT) DNA expression cassette, comprising a minimal promoter and 5-prime UTR operably linked to a gene encoding DS-Red Express, followed by a terminator.

[0060] FIG. 10 depicts fluorescence imaging of immature maize embryos (IMEs) transformed with the GACT cassette and: S. pyogenes deactivated Cas9 linked to the Arabidopsis CBF1 transcriptional activator via two different linkers GRA and 30XQ, in the absence of a guide RNA (negative controls), or S. pyogenes deactivated Cas9 linked to the Arabidopsis CBF1 transcriptional activator via two different linkers GRA and 30XQ in the presence of a guide RNA. The IMEs transformed with the S. pyogenes deactivated Cas9 linked to the Arabidopsis CBF1 transcriptional activator via the GRA linker showed greater fluorescence than the IMEs with the 30XQ linker.

[0061] FIG. 11 depicts fluorescence imaging of immature maize embryos (IMEs) simultaneously transformed with the GACT cassette and individual expression cassettes of the S. thermophilus Type I-E cascade proteins Cas5, Cse1, Cas6, Cas7, and Cse2, along with an expression cassette producing the guide RNA operably linked to either the PolII promoter or the PolIII promoter, as well as the GACT cassette; and incubated at either 28 degrees Celsius or 37 degrees Celsius. IMEs incubated at 37 degrees Celsius exhibited higher fluorescence than those at 28 degrees Celsius. IMEs expressing the guide RNA with the PolII promoter exhibited similar fluorescence as those expressing the guide RNA with the PolIII promoter.

[0062] FIG. 12 shows that Ds-Red gene activation was enhanced when AtCBF1 was linked to the C-termini of Cas6 and Cse1 relative to Cas5, and moreover, when combined, AtCBF1 linked Cas5, Cas6, and Cse1 Ds-Red gene activation surpassed that generated by Spy dCas9 linked (GRA) AtCBF1.Taken together, this indicates that the Type I-E cascade complex and guide RNA from Streptococcus thermophilus DGCC7710 may be engineered to form a functional complex in maize cells and be used for plant gene transcriptional activation.

[0063] FIG. 13 shows the endogenous R1 gene targeted for transcriptional up-regulation by cascade while over-expressing the C1 gene, to induce anthocyanin production using Sth7710 cascade.

[0064] FIG. 14 shows that the anthocyanin phenotype was observed for the Sth7710 cascade.

[0065] FIG. 15 shows cooperative nicking strategies using a Cas3 nickase and two Sth7710 cascade targets. The whole oval represents the cascade complex and the half oval depicts the Cas3 nickase recruited following cascade target recognition. Arrows illustrate strand specific DNA nicking by the Cas3 nickase.

[0066] FIG. 16 shows nicking using a Cas3 nickase and two Sth7710 cascade targets (A4+/A3−) (see Table 15) in close proximity (on opposite DNA strands) resulted in targeted chromosomal mutagenesis. The predominant mutation patterns were large deletions (>10 bp) of variable length that typically originated within one of the Sth7710 cascade target sequences although small deletion (1 or 2 bp) mutations were also detected. 3 additional pairs of Sth7710 cascade target sites (A2+/A1−, A2+/A3−, and A4+/A1−) (Table 15) were selected for testing with the Cas3 nickase.

[0067] FIG. 17A shows the gene encoding the Ds-Red Express fluorescent protein (SEQ ID NO:107) may be partially duplicated and a cascade target sequence can be incorporated between the duplicated fragments. To boost expression, the 5 prime end of the partially duplicated DsRed gene is operably linked to the cauliflower mosaic virus 35S (CAMV35S) enhancer (SEQ ID NO:127) and Maize Histone 2B (H2B) promoter (SEQ ID NO:192) and the 3 prime end fused with the Potato Proteinase Inhibitor II (PINII) terminator (SEQ ID NO:193) resulting in a Ds-target site-sRed reporter construct illustrated in FIG. 17A. With this configuration, cleavage and cellular repair of the target sequence will result in two outcomes. The first outcome is intramolecular DNA repair between the duplicated regions of the Ds-Red gene. This restores the gene resulting in Ds-Red expression and immunofluorescence (FIG. 17B). The second outcome (as shown in FIG. 17C) produces indel mutations indicative of DNA target cleavage and repair by the non-homologous end-joining (NHEJ) pathway that can be detected by targeted deep sequencing.

[0068] FIG. 18 shows that expression cassettes encoding I-TevI fused to the 5 prime end of the cse1 genes (SEQ ID NOS: 187 and 188) produced Ds-Red immunofluorescent signal, indicative of target cleavage and intramolecular repair and functional restoration of the Ds-Red gene.

[0069] FIG. 19 shows that deep sequencing of mutations at target site SEQ ID NO:194 yielded small insertion or deletion mutations originating within the cleavage sites of the I-Tev cleavage motif, CNNNG (where N represents any base pair A, T, G, or C), indicative of NHEJ DNA repair, further collaborating the fluorescent imaging data. Dashes represent deletions while lower case font denotes base pair insertions.

[0070] FIG. 20 shows that deep sequencing of mutations at target site SEQ ID NO:205 yielded small insertion or deletion mutations originating within the cleavage sites of the I-TevI cleavage motif, CNNNG (where N represents any base pair A, T, G, or C), indicative of NHEJ DNA repair further, collaborating the fluorescent imaging data. Dashes represent deletions while lower case font denotes base pair insertions.

[0071] FIG. 21 shows that mutations demonstrative of DNA target cleavage and NHEJ repair at target site SEQ ID NO:216 were also recovered for a DNA expression construct (SEQ ID NO: 185) where the I-TevI cleavage domain was appended to the 5 prime end of the cas6 gene. Dashes represent deletions while lower case font denotes base pair insertions.

[0072] FIG. 22 shows that mutations demonstrative of DNA target cleavage and NHEJ repair at target site SEQ ID NO:216 were also recovered for a DNA expression construct (SEQ ID NO: 186) where the I-TeVI cleavage domain was appended to the 5 prime end of the cas6 gene.

[0073] SEQ ID NO:1 is the Type I CRISPR repeat DNA sequence from Streptococcus thermophilus.

[0074] SEQ ID NO:2 is the cas5 gene DNA sequence from Streptococcus thermophilus.

[0075] SEQ ID NO:3 is the cas6 gene DNA sequence from Streptococcus thermophilus.

[0076] SEQ ID NO:4 is the cas7 gene DNA sequence from Streptococcus thermophilus.

[0077] SEQ ID NO:5 is the cse1 gene DNA sequence from Streptococcus thermophilus.

[0078] SEQ ID NO:6 is the cse2 gene DNA sequence from Streptococcus thermophilus.

[0079] SEQ ID NO:7 is the cas3 gene DNA sequence from Streptococcus thermophilus.

[0080] SEQ ID NO:8 is the cas1 gene DNA sequence from Streptococcus thermophilus.

[0081] SEQ ID NO:9 is the cas2 gene DNA sequence from Streptococcus thermophilus.

[0082] SEQ ID NO:10 is the Cas5 protein PRT sequence from Streptococcus thermophilus.

[0083] SEQ ID NO:11 is the Cas6 protein PRT sequence from Streptococcus thermophilus.

[0084] SEQ ID NO:12 is the Cas7 protein PRT sequence from Streptococcus thermophilus.

[0085] SEQ ID NO:13 is the Cse1 protein PRT sequence from Streptococcus thermophilus.

[0086] SEQ ID NO:14 is the Cse2 protein PRT sequence from Streptococcus thermophilus.

[0087] SEQ ID NO:15 is the Cas3 protein PRT sequence from Streptococcus thermophilus.

[0088] SEQ ID NO:16 is the Cas1 protein PRT sequence from Streptococcus thermophilus.

[0089] SEQ ID NO:17 is the Cas2 protein PRT sequence from Streptococcus thermophilus.

[0090] SEQ ID NO:18 is the SV40 NLS PRT sequence from Simian virus 40 .

[0091] SEQ ID NO:19 is the cas5 no NLS DNA sequence.

[0092] SEQ ID NO:20 is the cas6 no NLS DNA sequence.

[0093] SEQ ID NO:21 is the cas7 no NLS DNA sequence.

[0094] SEQ ID NO:22 is the cse1 no NLS DNA sequence.

[0095] SEQ ID NO:23 is the cse2 no NLS DNA sequence.

[0096] SEQ ID NO:24 is the cas5 N terminal NLS DNA sequence.

[0097] SEQ ID NO:25 is the cas5 C terminal NLS DNA sequence.

[0098] SEQ ID NO:26 is the cse1 N terminal NLS DNA sequence.

[0099] SEQ ID NO:27 is the cas6 C terminal NLS DNA sequence.

[0100] SEQ ID NO:28 is the cas7 C terminal NLS DNA sequence.

[0101] SEQ ID NO:29 is the cse2 C terminal NLS DNA sequence.

[0102] SEQ ID NO:30 is the cas5 N terminal NLS protein PRT sequence.

[0103] SEQ ID NO:31 is the cas5 C terminal NLS protein PRT sequence.

[0104] SEQ ID NO:32 is the cse1 N terminal NLS protein PRT sequence.

[0105] SEQ ID NO:33 is the cas6 C terminal NLS protein PRT sequence.

[0106] SEQ ID NO:34 is the cas7 C terminal NLS protein PRT sequence.

[0107] SEQ ID NO:35 is the cse2 C terminal NLS protein PRT sequence.

[0108] SEQ ID NO:36 is the Maize UBI promoter DNA sequence from Zea mays.

[0109] SEQ ID NO:37 is the Maize UBI 5 prime untranslated region DNA sequence from Zea mays.

[0110] SEQ ID NO:38 is the Maize UBI intron 1 DNA sequence from Zea mays.

[0111] SEQ ID NO:39 is the UBI cas5 no NLS DNA sequence.

[0112] SEQ ID NO:40 is the UBI cas6 no NLS DNA sequence.

[0113] SEQ ID NO:41 is the UBI cas7 no NLS DNA sequence.

[0114] SEQ ID NO:42 is the UBI cse1 no NLS DNA sequence.

[0115] SEQ ID NO:43 is the UBI cse2 no NLS DNA sequence.

[0116] SEQ ID NO:44 is the UBI cas5 N terminal NLS DNA sequence.

[0117] SEQ ID NO:45 is the UBI cas5 C terminal NLS DNA sequence.

[0118] SEQ ID NO:46 is the UBI cse1 N terminal NLS DNA sequence.

[0119] SEQ ID NO:47 is the UBI cas6 C terminal NLS DNA sequence.

[0120] SEQ ID NO:48 is the UBI cas7 C terminal NLS DNA sequence.

[0121] SEQ ID NO:49 is the UBI cse2 C terminal NLS DNA sequence.

[0122] SEQ ID NO:50 is the Transcriptional activator motif from AtCBF1 DNA sequence from Arabidopsis thaliana.

[0123] SEQ ID NO:51 is the cas5 gene with N-terminal NLS linked by 30XQ to AtCBF1 motif DNA sequence.

[0124] SEQ ID NO:52 is the cas5 gene with N-terminal NLS linked by GRA to AtCBF1 motif DNA sequence.

[0125] SEQ ID NO:53 is the cas5 gene with C-terminal NLS linked by 30XQ to AtCBF1 motif DNA sequence.

[0126] SEQ ID NO:54 is the cas5 gene with C-terminal NLS linked by GRA to AtCBF1 motif DNA sequence.

[0127] SEQ ID NO:55 is the cse1 gene with N-terminal NLS linked by 30XQ to AtCBF1 motif DNA sequence.

[0128] SEQ ID NO:56 is the cse1 gene with N-terminal NLS linked by GRA to AtCBF1 motif DNA sequence.

[0129] SEQ ID NO:57 is the protein of cas5 gene with N-terminal NLS linked by 30XQ to AtCBF1 motif PRT sequence.

[0130] SEQ ID NO:58 is the protein of cas5 gene with N-terminal NLS linked by GRA to AtCBF1 motif PRT sequence.

[0131] SEQ ID NO:59 is the protein of cas5 gene with C-terminal NLS linked by 30XQ to AtCBF1 motif PRT sequence.

[0132] SEQ ID NO:60 is the protein of cas5 gene with C-terminal NLS linked by GRA to AtCBF1 motif PRT sequence.

[0133] SEQ ID NO:61 is the protein of cse1 gene with N-terminal NLS linked by 30XQ to AtCBF1 motif PRT sequence.

[0134] SEQ ID NO:62 is the protein of cse1 gene with N-terminal NLS linked by GRA to AtCBF1 motif PRT sequence.

[0135] SEQ ID NO:63 is the Spy cas9 gene DNA sequence.

[0136] SEQ ID NO:64 is the protein from Spy dcas9 gene PRT sequence.

[0137] SEQ ID NO:65 is the Spy dcas9 gene linked with AtCBF1 transcriptional activator by 30XQ DNA sequence.

[0138] SEQ ID NO:66 is the Spy dcas9 gene linked with AtCBF1 transcriptional activator by GRA DNA sequence.

[0139] SEQ ID NO:67 is the protein of Spy dcas9 gene linked with AtCBF1 transcriptional activator by 30XQ PRT sequence.

[0140] SEQ ID NO:68 is the protein of Spy dcas9 gene linked with AtCBF1 transcriptional activator by GRA PRT sequence.

[0141] SEQ ID NO:69 is the UBI cas5 gene with N-terminal NLS linked by 30XQ to AtCBF1 motif DNA sequence.

[0142] SEQ ID NO:70 is the UBI cas5 gene with N-terminal NLS linked by GRA to AtCBF1 motif DNA sequence.

[0143] SEQ ID NO:71 is the UBI cas5 gene with C-terminal NLS linked by 30XQ to AtCBF1 motif DNA sequence.

[0144] SEQ ID NO:72 is the UBI cas5 gene with C-terminal NLS linked by GRA to AtCBF1 motif DNA sequence.

[0145] SEQ ID NO:73 is the UBI cse1 gene with N-terminal NLS linked by 30XQ to AtCBF1 motif DNA sequence.

[0146] SEQ ID NO:74 is the UBI cse1 gene with N-terminal NLS linked by GRA to AtCBF1 motif DNA sequence.

[0147] SEQ ID NO:75 is the UBI Spy dcas9 gene linked with AtCBF1 transcriptional activator by 30XQ DNA sequence.

[0148] SEQ ID NO:76 is the UBI Spy dcas9 gene linked with AtCBF1 transcriptional activator by GRA DNA sequence.

[0149] SEQ ID NO:77 is the Maize U6 polymerase III promoter DNA sequence from Zea mays.

[0150] SEQ ID NO:78 is the Mature Type I-E guide RNA RNA sequence.

[0151] SEQ ID NO:79 is the GACT targeting CRISPR array DNA sequence.

[0152] SEQ ID NO:80 is the Maize UBI polymerase II GACT guide RNA expression cassette DNA sequence.

[0153] SEQ ID NO:81 is the Maize U6 polymerase III GACT guide RNA expression cassette DNA sequence.

[0154] SEQ ID NO:82 is the Maize codon optimized cas3 gene DNA sequence.

[0155] SEQ ID NO:83 is the ST-LS1 intron 2 DNA sequence from Solanum tuberosum.

[0156] SEQ ID NO:84 is the Maize codon optimized cas3 gene with ST-LS1 intron 2 DNA sequence.

[0157] SEQ ID NO:85 is the Maize codon optimized cas3 nickase gene with ST-LS1 intron 2 DNA sequence.

[0158] SEQ ID NO:86 is the cas3 with N-terminal NLS DNA sequence.

[0159] SEQ ID NO:87 is the cas3 with C-terminal NLS DNA sequence.

[0160] SEQ ID NO:88 is the cas3 with both N- and C-terminal NLSs DNA sequence.

[0161] SEQ ID NO:89 is the cas3 nickase with N-terminal NLS DNA sequence.

[0162] SEQ ID NO:90 is the cas3 nickase with C-terminal NLS DNA sequence.

[0163] SEQ ID NO:91 is the cas3 nickase with both N- and C-terminal NLSs DNA sequence.

[0164] SEQ ID NO:92 is the protein of cas3 with N-terminal NLS PRT sequence.

[0165] SEQ ID NO:93 is the protein of cas3 with C-terminal NLS PRT sequence.

[0166] SEQ ID NO:94 is the protein of cas3 with both N- and C-terminal NLSs PRT sequence.

[0167] SEQ ID NO:95 is the protein of cas3 nickase with N-terminal NLS PRT sequence.

[0168] SEQ ID NO:96 is the protein of cas3 nickase with C-terminal NLS PRT sequence.

[0169] SEQ ID NO:97 is the protein of cas3 nickase with both N- and C-terminal NLSs PRT sequence.

[0170] SEQ ID NO:98 is the UBI cas3 with N-terminal NLS DNA sequence.

[0171] SEQ ID NO:99 is the UBI cas3 with C-terminal NLS DNA sequence.

[0172] SEQ ID NO:100 is the UBI cas3 with both N- and C-terminal NLSs DNA sequence.

[0173] SEQ ID NO:101 is the UBI cas3 nickase with N-terminal NLS DNA sequence.

[0174] SEQ ID NO:102 is the UBI cas3 nickase with C-terminal NLS DNA sequence.

[0175] SEQ ID NO:103 is the UBI cas3 nickase with both N- and C-terminal NLSs DNA sequence.

[0176] SEQ ID NO:104 is the Upstream binding region for Type I-E Cascade guide RNA complexes DNA sequence.

[0177] SEQ ID NO:105 is the Minimal 35S promoter from the cauliflower mosaic virus (CMV) DNA sequence from Cauliflower Mosaic Virus.

[0178] SEQ ID NO:106 is the 5 prime untranslated region (UTR) from the tobacco mosaic virus (TMV) DNA sequence from Tobacco Mosaic Virus.

[0179] SEQ ID NO:107 is the Gene encoding Ds-Red Express fluorescent protein DNA sequence.

[0180] SEQ ID NO:108 is the Rice Ubiquitin terminator DNA sequence from Oryza sativa.

[0181] SEQ ID NO:109 is the GACT expression cassette DNA sequence.

[0182] SEQ ID NO:110 is the cash gene with C-terminal linkage to AtCBF1 motif DNA sequence.

[0183] SEQ ID NO:111 is the cse1 gene with C-terminal linkage to AtCBF1 motif DNA sequence.

[0184] SEQ ID NO:112 is the UBI cas6 gene with C-terminal linkage to AtCBF1 motif DNA sequence.

[0185] SEQ ID NO:113 is the UBI cse1 gene with C-terminal linkage to AtCBF1 motif DNA sequence.

[0186] SEQ ID NO:114 is the GACT2 expression cassette DNA sequence.

[0187] SEQ ID NO:115 is the Spy dCas9 U6 polymerase III guide RNA expression construct targeting GACT2 DNA sequence.

[0188] SEQ ID NO:116 is the Sth7710 Cascade U6 polymerase III guide RNA expression construct targeting GACT2 DNA sequence.

[0189] SEQ ID NO:117 is the Sth7710 Cascade R1 protospacer target A2+ DNA sequence from Zea mays.

[0190] SEQ ID NO:118 is the Sth7710 Cascade R1 protospacer target A4+ DNA sequence from Zea mays.

[0191] SEQ ID NO:119 is the Sth7710 Cascade R1 protospacer target A1− DNA sequence from Zea mays.

[0192] SEQ ID NO:120 is the Spy dCas9 R1 protospacer target A3+ DNA sequence from Zea mays.

[0193] SEQ ID NO:121 is the Spy dCas9 R1 protospacer target A7+ DNA sequence from Zea mays.

[0194] SEQ ID NO:122 is the Spy dCas9 R1 protospacer target A2− DNA sequence from Zea mays.

[0195] SEQ ID NO:123 is the Sth7710 Cascade U6 polymerase III guide RNA expression construct targeting A2+ DNA sequence.

[0196] SEQ ID NO:124 is the Sth7710 Cascade U6 polymerase III guide RNA expression construct targeting A4+ DNA sequence.

[0197] SEQ ID NO:125 is the Sth7710 Cascade U6 polymerase III guide RNA expression construct targeting A1− DNA sequence.

[0198] SEQ ID NO:126 is the C1 coding DNA sequence DNA sequence from Zea mays.

[0199] SEQ ID NO:127 is the Cauliflower Mosaic Virus 35S enhancer DNA sequence from Cauliflower Mosaic Virus.

[0200] SEQ ID NO:128 is the Cauliflower Mosaic Virus promoter DNA sequence from Cauliflower Mosaic Virus.

[0201] SEQ ID NO:129 is the Alcohol dehydrogenase 1 intron 1 DNA sequence from Zea mays.

[0202] SEQ ID NO:130 is the Cl gene over-expression cassette DNA sequence.

[0203] SEQ ID NO:131 is the R1 coding DNA sequence DNA sequence from Zea mays.

[0204] SEQ ID NO:132 is the R1 gene over-expression cassette DNA sequence.

[0205] SEQ ID NO:133 is the Spy dCas9 U6 polymerase III guide RNA expression construct targeting A3+ DNA sequence.

[0206] SEQ ID NO:134 is the Spy dCas9 U6 polymerase III guide RNA expression construct targeting A7+ DNA sequence.

[0207] SEQ ID NO:135 is the Spy dCas9 U6 polymerase III guide RNA expression construct targeting A2− DNA sequence.

[0208] SEQ ID NO:136 is the Wildtype targeting sequence-FIG.16 DNA sequence from Zea mays.

[0209] SEQ ID NO:137 is the Mutation 1-FIG.16 DNA sequence.

[0210] SEQ ID NO:138 is the Mutation 2-FIG.16 DNA sequence.

[0211] SEQ ID NO:139 is the Mutation 3-FIG.16 DNA sequence.

[0212] SEQ ID NO:140 is the Mutation 4-FIG.16 DNA sequence.

[0213] SEQ ID NO:141 is the Mutation 5-FIG.16 DNA sequence.

[0214] SEQ ID NO:142 is the Mutation 6-FIG.16 DNA sequence.

[0215] SEQ ID NO:143 is the Mutation 7-FIG.16 DNA sequence.

[0216] SEQ ID NO:144 is the Mutation 8-FIG.16 DNA sequence.

[0217] SEQ ID NO:145 is the Mutation 9-FIG.16 DNA sequence.

[0218] SEQ ID NO:146 is the Mutation 10-FIG.16 DNA sequence.

[0219] SEQ ID NO:147 is the Mutation 11-FIG.16 DNA sequence.

[0220] SEQ ID NO:148 is the Mutation 12-FIG.16 DNA sequence.

[0221] SEQ ID NO:149 is the Mutation 13-FIG.16 DNA sequence.

[0222] SEQ ID NO:150 is the Mutation 14-FIG.16 DNA sequence.

[0223] SEQ ID NO:151 is the Mutation 15-FIG.16 DNA sequence.

[0224] SEQ ID NO:152 is the Mutation 16-FIG.16 DNA sequence.

[0225] SEQ ID NO:153 is the Mutation 17-FIG.16 DNA sequence.

[0226] SEQ ID NO:154 is the Mutation 18-FIG.16 DNA sequence.

[0227] SEQ ID NO:155 is the Mutation 19-FIG.16 DNA sequence.

[0228] SEQ ID NO:156 is the Mutation 20-FIG.16 DNA sequence.

[0229] SEQ ID NO:157 is the Mutation 21-FIG.16 DNA sequence.

[0230] SEQ ID NO:158 is the Mutation 22-FIG.16 DNA sequence.

[0231] SEQ ID NO:159 is the Mutation 23-FIG.16 DNA sequence.

[0232] SEQ ID NO:160 is the Mutation 24-FIG.16 DNA sequence.

[0233] SEQ ID NO:161 is the Mutation 25-FIG.16 DNA sequence.

[0234] SEQ ID NO:162 is the Mutation 26-FIG.16 DNA sequence.

[0235] SEQ ID NO:163 is the Sth7710 Cascade R1 protospacer target A3− DNA sequence from Zea mays.

[0236] SEQ ID NO:164 is the Sth7710 Cascade U6 polymerase III guide RNA expression construct targeting A3− DNA sequence.

[0237] SEQ ID NO:165 is the Sequence encoding I-TevI amino terminal nuclease domain DNA sequence from Escherichia virus T4.

[0238] SEQ ID NO:166 is the sequence encoding I-TevI amino terminal nuclease domain DNA sequence.

[0239] SEQ ID NO:167 is the nuclease enabled I-TevI:cas6:NLS DNA sequence.

[0240] SEQ ID NO:168 is the nuclease enabled I-TevI:GRA:cas6:NLS DNA sequence.

[0241] SEQ ID NO:169 is the nuclease enabled I-TevI:(G2S)3:cas6:NLS DNA sequence.

[0242] SEQ ID NO:170 is the nuclease enabled I-TevI:XTEN:cas6:NLS DNA sequence.

[0243] SEQ ID NO:171 is the nuclease enabled I-TevI:cse1:NLS DNA sequence.

[0244] SEQ ID NO:172 is the nuclease enabled I-TevI:GRA:cse1:NLS DNA sequence.

[0245] SEQ ID NO:173 is the nuclease enabled I-TevI:(G2S)3:cse1:NLS DNA sequence.

[0246] SEQ ID NO:174 is the nuclease enabled I-TevI:XTEN:csel:NLS DNA sequence.

[0247] SEQ ID NO:175 is the Protein of nuclease enabled I-TevI:cas6:NLS PRT sequence.

[0248] SEQ ID NO:176 is the Protein of nuclease enabled I-TevI:GRA:cas6:NLS PRT sequence.

[0249] SEQ ID NO:177 is the Protein of nuclease enabled I-TevI:(G2S)3:cas6:NLS PRT sequence.

[0250] SEQ ID NO:178 is the Protein of nuclease enabled I-TevI:XTEN:cas6:NLS PRT sequence.

[0251] SEQ ID NO:179 is the Protein of nuclease enabled I-TevI:cse1:NLS PRT sequence.

[0252] SEQ ID NO:180 is the Protein of nuclease enabled I-TevI:GRA:cse1:NLS PRT sequence.

[0253] SEQ ID NO:181 is the Protein of nuclease enabled I-TevI:(G2S)3:cse1:NLS PRT sequence.

[0254] SEQ ID NO:182 is the Protein of nuclease enabled I-TevI:XTEN:cse1:NLS PRT sequence.

[0255] SEQ ID NO:183 is the UBI nuclease enabled I-TevI:cas6:NLS DNA sequence.

[0256] SEQ ID NO:184 is the UBI nuclease enabled I-TevI:GRA:cas6:NLS DNA sequence.

[0257] SEQ ID NO:185 is the UBI nuclease enabled I-TevI:(G2S)3:cas6:NLS DNA sequence.

[0258] SEQ ID NO:186 is the UBI nuclease enabled I-TevI:XTEN:cas6:NLS DNA sequence.

[0259] SEQ ID NO:187 is the UBI nuclease enabled I-TevI:cse1:NLS DNA sequence.

[0260] SEQ ID NO:188 is the UBI nuclease enabled I-TevI:GRA:cse1:NLS DNA sequence.

[0261] SEQ ID NO:189 is the UBI nuclease enabled I-TevI:(G2S)3:cse1:NLS DNA sequence.

[0262] SEQ ID NO:190 is the UBI nuclease enabled I-TevI:XTEN:csel:NLS DNA sequence.

[0263] SEQ ID NO:191 is the Immunofluorescent cascade target sequence DNA sequence.

[0264] SEQ ID NO:192 is the Maize Histone 2B promoter DNA sequence from Zea mays.

[0265] SEQ ID NO:193 is the Potato Proteinase Inhibitor II terminator DNA sequence from Solanum tuberosum.

[0266] SEQ ID NO:194 is the Wildtype targeting sequence-FIG. 19 DNA sequence.

[0267] SEQ ID NO:195 is the Mutation 1-FIG. 19 DNA sequence.

[0268] SEQ ID NO:196 is the Mutation 2-FIG. 19 DNA sequence.

[0269] SEQ ID NO:197 is the Mutation 3-FIG. 19 DNA sequence.

[0270] SEQ ID NO:198 is the Mutation 4-FIG. 19 DNA sequence.

[0271] SEQ ID NO:199 is the Mutation 5-FIG. 19 DNA sequence.

[0272] SEQ ID NO:200 is the Mutation 6-FIG. 19 DNA sequence.

[0273] SEQ ID NO:201 is the Mutation 7-FIG. 19 DNA sequence.

[0274] SEQ ID NO:202 is the Mutation 8-FIG.19 DNA sequence.

[0275] SEQ ID NO:203 is the Mutation 9-FIG. 19 DNA sequence.

[0276] SEQ ID NO:204 is the Mutation 10-FIG. 19 DNA sequence.

[0277] SEQ ID NO:205 is the Wildtype targeting sequence-FIG. 20 DNA sequence.

[0278] SEQ ID NO:206 is the Mutation 1-FIG. 20 DNA sequence.

[0279] SEQ ID NO:207 is the Mutation 2-FIG. 20 DNA sequence.

[0280] SEQ ID NO:208 is the Mutation 3-FIG. 20 DNA sequence.

[0281] SEQ ID NO:209 is the Mutation 4-FIG. 20 DNA sequence.

[0282] SEQ ID NO:210 is the Mutation 5-FIG. 20 DNA sequence.

[0283] SEQ ID NO:211 is the Mutation 6-FIG. 20 DNA sequence.

[0284] SEQ ID NO:212 is the Mutation 7-FIG. 20 DNA sequence.

[0285] SEQ ID NO:213 is the Mutation 8-FIG. 20 DNA sequence.

[0286] SEQ ID NO:214 is the Mutation 9-FIG. 20 DNA sequence.

[0287] SEQ ID NO:215 is the Mutation 10-FIG. 20 DNA sequence.

[0288] SEQ ID NO:216 is the Wildtype targeting sequence-FIG. 21 DNA sequence.

[0289] SEQ ID NO:217 is the Mutation 1-FIG. 21 DNA sequence.

[0290] SEQ ID NO:218 is the Mutation 2-FIG. 21 DNA sequence.

[0291] SEQ ID NO:219 is the Mutation 3-FIG. 21 DNA sequence.

[0292] SEQ ID NO:220 is the Mutation 4-FIG. 21 DNA sequence.

[0293] SEQ ID NO:221 is the Mutation 5-FIG. 21 DNA sequence.

[0294] SEQ ID NO:222 is the Mutation 6-FIG. 21 DNA sequence.

[0295] SEQ ID NO:223 is the Mutation 7-FIG. 21 DNA sequence.

[0296] SEQ ID NO:224 is the Mutation 8-FIG. 21 DNA sequence.

[0297] SEQ ID NO:225 is the Mutation 9-FIG. 21 DNA sequence.

[0298] SEQ ID NO:226 is the Mutation 10-FIG. 21 DNA sequence.

[0299] SEQ ID NO:227 is the Mutation 1-FIG. 22 DNA sequence.

[0300] SEQ ID NO:228 is the Mutation 2-FIG. 22 DNA sequence.

[0301] SEQ ID NO:229 is the Mutation 3-FIG. 22 DNA sequence.

[0302] SEQ ID NO:230 is the Mutation 4-FIG. 22 DNA sequence.

[0303] SEQ ID NO:231 is the Mutation 5-FIG. 22 DNA sequence.

[0304] SEQ ID NO:232 is the Mutation 6-FIG. 22 DNA sequence.

[0305] SEQ ID NO:233 is the Mutation 7-FIG. 22 DNA sequence.

[0306] SEQ ID NO:234 is the Mutation 8-FIG. 22 DNA sequence.

[0307] SEQ ID NO:235 is the Mutation 9-FIG. 22 DNA sequence.

[0308] SEQ ID NO:236 is the Mutation 10-FIG. 22 DNA sequence.

[0309] SEQ ID NO: 237 is the Streptococcus mutans cas5 gene sequence.

[0310] SEQ ID NO: 238 is the Streptococcus mutans cas6 gene sequence.

[0311] SEQ ID NO: 239 is the Streptococcus mutans cas7 gene sequence.

[0312] SEQ ID NO: 240 is the Streptococcus mutans cse1 gene sequence.

[0313] SEQ ID NO: 241 is the Streptococcus mutans cse2 gene sequence.

[0314] SEQ ID NO: 242 is the Streptococcus mutans cas3 gene sequence.

[0315] SEQ ID NO: 243 is the Peptostreptococcus anaerobius cas5 gene sequence.

[0316] SEQ ID NO: 244 is the Peptostreptococcus anaerobius cas6 gene sequence.

[0317] SEQ ID NO: 245 is the Peptostreptococcus anaerobius cas7 gene sequence.

[0318] SEQ ID NO: 246 is the Peptostreptococcus anaerobius cse1 gene sequence.

[0319] SEQ ID NO: 247 is the Peptostreptococcus anaerobius cse2 gene sequence.

[0320] SEQ ID NO: 248 is the Peptostreptococcus anaerobius cas3 gene sequence.

[0321] SEQ ID NO: 249 is the Gardnerella vaginalis cas5 gene sequence.

[0322] SEQ ID NO: 250 is the Gardnerella vaginalis cas6 gene sequence.

[0323] SEQ ID NO: 251 is the Gardnerella vaginalis cas7 gene sequence.

[0324] SEQ ID NO: 252 is the Gardnerella vaginalis cse1 gene sequence.

[0325] SEQ ID NO: 253 is the Gardnerella vaginalis cse2 gene sequence.

[0326] SEQ ID NO: 254 is the Gardnerella vaginalis cas3 gene sequence.

[0327] SEQ ID NO: 255 is the Pseudomonas sp. S-6-2 cas5 gene sequence.

[0328] SEQ ID NO: 256 is the Pseudomonas sp. S-6-2 cas6 gene sequence.

[0329] SEQ ID NO: 257 is the Pseudomonas sp. S-6-2 cas7 gene sequence.

[0330] SEQ ID NO: 258 is the Pseudomonas sp. S-6-2 cse1 gene sequence.

[0331] SEQ ID NO: 259 is the Pseudomonas sp. S-6-2 cse2 gene sequence.

[0332] SEQ ID NO: 260 is the Pseudomonas sp. S-6-2 cas3 gene sequence.

[0333] SEQ ID NO: 261 is the Ralstonia solanacearum cas5 gene sequence.

[0334] SEQ ID NO: 262 is the Ralstonia solanacearum cas6 gene sequence.

[0335] SEQ ID NO: 263 is the Ralstonia solanacearum cas7 gene sequence.

[0336] SEQ ID NO: 264 is the Ralstonia solanacearum cse1 gene sequence.

[0337] SEQ ID NO: 265 is the Ralstonia solanacearum cse2 gene sequence.

[0338] SEQ ID NO: 266 is the Ralstonia solanacearum cas3 gene sequence.

[0339] SEQ ID NO: 267 is the Streptococcus mutans Cas5 protein sequence.

[0340] SEQ ID NO: 268 is the Streptococcus mutans Cas6 protein sequence.

[0341] SEQ ID NO: 269 is the Streptococcus mutans Cas7 protein sequence.

[0342] SEQ ID NO: 270 is the Streptococcus mutans Cse1 protein sequence.

[0343] SEQ ID NO: 271 is the Streptococcus mutans Cse2 protein sequence.

[0344] SEQ ID NO: 272 is the Streptococcus mutans Cas3 protein sequence.

[0345] SEQ ID NO: 273 is the Peptostreptococcus anaerobius Cas5 protein sequence.

[0346] SEQ ID NO: 274 is the Peptostreptococcus anaerobius Cas6 protein sequence.

[0347] SEQ ID NO: 275 is the Peptostreptococcus anaerobius Cas7 protein sequence.

[0348] SEQ ID NO: 276 is the Peptostreptococcus anaerobius Cse1 protein sequence.

[0349] SEQ ID NO: 277 is the Peptostreptococcus anaerobius Cse2 protein sequence.

[0350] SEQ ID NO: 278 is the Peptostreptococcus anaerobius Cas3 protein sequence.

[0351] SEQ ID NO: 279 is the Gardnerella vaginalis Cas5 protein sequence.

[0352] SEQ ID NO: 280 is the Gardnerella vaginalis Cas6 protein sequence.

[0353] SEQ ID NO: 281 is the Gardnerella vaginalis Cas7 protein sequence.

[0354] SEQ ID NO: 282 is the Gardnerella vaginalis Cse1 protein sequence.

[0355] SEQ ID NO: 283 is the Gardnerella vaginalis Cse2 protein sequence.

[0356] SEQ ID NO: 284 is the Gardnerella vaginalis Cas3 protein sequence.

[0357] SEQ ID NO: 285 is the Pseudomonas sp. S-6-2 Cas5 protein sequence.

[0358] SEQ ID NO: 286 is the Pseudomonas sp. S-6-2 Cas6 protein sequence.

[0359] SEQ ID NO: 287 is the Pseudomonas sp. S-6-2 Cas7 protein sequence.

[0360] SEQ ID NO: 288 is the Pseudomonas sp. S-6-2 Cse1 protein sequence.

[0361] SEQ ID NO: 289 is the Pseudomonas sp. S-6-2 Cse2 protein sequence.

[0362] SEQ ID NO: 290 is the Pseudomonas sp. S-6-2 Cas3 protein sequence.

[0363] SEQ ID NO: 291 is the Ralstonia solanacearum Cas5 protein sequence.

[0364] SEQ ID NO: 292 is the Ralstonia solanacearum Cas6 protein sequence.

[0365] SEQ ID NO: 293 is the Ralstonia solanacearum Cas7 protein sequence.

[0366] SEQ ID NO: 294 is the Ralstonia solanacearum Cse1 protein sequence.

[0367] SEQ ID NO: 295 is the Ralstonia solanacearum Cse2 protein sequence.

[0368] SEQ ID NO: 296 is the Ralstonia solanacearum Cas3 protein sequence.

### DETAILED DESCRIPTION

[0369] Compositions and methods are provided for novel CRISPR effector systems and elements comprising such systems, including, but not limiting to, novel guide polynucleotide/endonuclease complexes, guide polynucleotides, guide RNA elements, Cas proteins, and endonucleases, as well as proteins comprising an endonuclease functionality (domain) as well as at least one other functionality (domain) such as, but not limited to, a protein subunit capable of forming a cascade. Compositions and methods are also provided for direct delivery of endonucleases, cleavage ready cascades, guide RNAs and guide RNA/endonuclease complexes. The present disclosure further includes compositions and methods for genome modification of a target sequence in the genome of a cell, for gene editing, and for inserting a polynucleotide of interest into the genome of a cell.

[0370] Terms used in the claims and specification are defined as set forth below unless otherwise specified. It must be noted that, as used in the specification and the appended claims, the singular forms “a,” “an” and “the” include plural referents unless the context clearly dictates otherwise.

### Definitions

[0371] As used herein, “nucleic acid” means a polynucleotide and includes a single or a double-stranded polymer of deoxyribonucleotide or ribonucleotide bases. Nucleic acids may also include fragments and modified nucleotides. Thus, the terms “polynucleotide”, “nucleic acid sequence”, “nucleotide sequence” and “nucleic acid fragment” are used interchangeably to denote a polymer of RNA and/or DNA and/or RNA-DNA that is single- or double-stranded, optionally comprising synthetic, non-natural, or altered nucleotide bases. Nucleotides (usually found in their 5′-monophosphate form) are referred to by their single letter designation as follows: “A” for adenosine or deoxyadenosine (for RNA or DNA, respectively), “C” for cytosine or deoxycytosine, “G” for guanosine or deoxyguanosine, “U” for uridine, “T” for deoxythymidine, “R” for purines (A or G), “Y” for pyrimidines (C or T), “K” for G or T, “H” for A or C or T, “I” for inosine, and “N” for any nucleotide.

[0372] The term “genome” as it applies to a prokaryotic and eukaryotic cell or organism cells encompasses not only chromosomal DNA found within the nucleus, but organelle DNA found within subcellular components (e.g., mitochondria, or plastid) of the cell.

[0373] “Open reading frame” is abbreviated ORF.

[0374] The term “selectively hybridizes” includes reference to hybridization, under stringent hybridization conditions, of a nucleic acid sequence to a specified nucleic acid target sequence to a detectably greater degree (e.g., at least 2-fold over background) than its hybridization to non-target nucleic acid sequences and to the substantial exclusion of non-target nucleic acids. Selectively hybridizing sequences typically have about at least 80% sequence identity, or 90% sequence identity, up to and including 100% sequence identity (i.e., fully complementary) with each other.

[0375] The term “substantially complementary” refers to the relationship between a first polynucleotide sequence and a second polynucleotide sequence. In some aspects, a first polynucleotide sequence shares at least 80%, between 80% and 85%, at least 85%, between 85% and 90%, at least 90%, between 90% and 95%, at least 95%, between 95% and 96%, at least 96%, between 96% and 97%, at least 97%, between 97% and 98%, at least 98%, between 98% and 99%, at least 99%, between 99% and 100%, or 100% sequence identity with a second polynucleotide sequence over the length of either the first or second polynucleotide, or a fragment of either. In some aspects, a first polynucleotide sequence differs from a second polynucleotide sequence by one nucleotide, by two, three, four, five, six, seven, eight, nine, ten, 11, 12, 13, 14, 15, 16, 17, 18, 19, 20, or greater than 20 nucleotides, over the length of either the first or the second polynucleotide, or a fragment of either. In some aspects, the first polynucleotide sequence is the same length as the second polynucleotide sequence. In some aspects, the first polynucleotide sequence is longer than the second polynucleotide sequence. In some aspects, the first polynucleotide sequence is shorter than the second polynucleotide sequence.

[0376] The term “stringent conditions” or “stringent hybridization conditions” includes reference to conditions under which a probe will selectively hybridize to its target sequence in an in vitro hybridization assay. Stringent conditions are sequence-dependent and will be different in different circumstances. By controlling the stringency of the hybridization and/or washing conditions, target sequences can be identified which are 100% complementary to the probe (homologous probing). Alternatively, stringency conditions can be adjusted to allow some mismatching in sequences so that lower degrees of similarity are detected (heterologous probing). Generally, a probe is less than about 1000 nucleotides in length, optionally less than 500 nucleotides in length. Typically, stringent conditions will be those in which the salt concentration is less than about 1.5 M Na ion, typically about 0.01 to 1.0 M Na ion concentration (or other salt(s)) at pH 7.0 to 8.3, and at least about 30° C. for short probes (e.g., 10 to 50 nucleotides) and at least about 60° C. for long probes (e.g., greater than 50 nucleotides). Stringent conditions may also be achieved with the addition of destabilizing agents such as formamide. Exemplary low stringency conditions include hybridization with a buffer solution of 30 to 35% formamide, 1 M NaCl, 1% SDS (sodium dodecyl sulphate) at 37° C., and a wash in 1× to 2× SSC (20× SSC=3.0 M NaCl/0.3 M trisodium citrate) at 50 to 55° C. Exemplary moderate stringency conditions include hybridization in 40 to 45% formamide, 1 M NaCl, 1% SDS at 37° C., and a wash in 0.5× to 1× SSC at 55 to 60° C. Exemplary high stringency conditions include hybridization in 50% formamide, 1 M NaCl, 1% SDS at 37° C., and a wash in 0.1× SSC at 60 to 65° C.

[0377] By “homology” is meant DNA sequences that are similar. For example, a “region of homology to a genomic region” that is found on the donor DNA is a region of DNA that has a similar sequence to a given “genomic region” in the cell or organism genome. A region of homology can be of any length that is sufficient to promote homologous recombination at the cleaved target site. For example, the region of homology can comprise at least 5-10, 5-15, 5-20, 5-25, 5-30, 5-35, 5-40, 5-45, 5-50, 5-55, 5-60, 5-65, 5-70, 5-75, 5-80, 5-85, 5-90, 5-95, 5-100, 5-200, 5-300, 5-400, 5-500, 5-600, 5-700, 5-800, 5-900, 5-1000, 5-1100, 5-1200, 5-1300, 5-1400, 5-1500, 5-1600, 5-1700, 5-1800, 5-1900, 5-2000, 5-2100, 5-2200, 5-2300, 5-2400, 5-2500, 5-2600, 5-2700, 5-2800, 5-2900, 5-3000, 5-3100 or more bases in length such that the region of homology has sufficient homology to undergo homologous recombination with the corresponding genomic region. “Sufficient homology” indicates that two polynucleotide sequences have sufficient structural similarity to act as substrates for a homologous recombination reaction. The structural similarity includes overall length of each polynucleotide fragment, as well as the sequence similarity of the polynucleotides. Sequence similarity can be described by the percent sequence identity over the whole length of the sequences, and/or by conserved regions comprising localized similarities such as contiguous nucleotides having 100% sequence identity, and percent sequence identity over a portion of the length of the sequences.

[0378] As used herein, a “genomic region” is a segment of a chromosome in the genome of a cell that is present on either side of the target site or, alternatively, also comprises a portion of the target site. The genomic region can comprise at least 5-10, 5-15, 5-20, 5-25, 5-30, 5-35, 5-40, 5-45, 5-50, 5-55, 5-60, 5-65, 5-70, 5-75, 5-80, 5-85, 5-90, 5-95, 5-100, 5-200, 5-300, 5-400, 5-500, 5-600, 5-700, 5-800, 5-900, 5-1000, 5-1100, 5-1200, 5-1300, 5-1400, 5-1500, 5-1600, 5-1700, 5-1800, 5-1900, 5-2000, 5-2100, 5-2200, 5-2300, 5-2400, 5-2500, 5-2600, 5-2700, 5-2800. 5-2900, 5-3000, 5-3100 or more bases such that the genomic region has sufficient homology to undergo homologous recombination with the corresponding region of homology.

[0379] As used herein, “homologous recombination” (HR) includes the exchange of DNA fragments between two DNA molecules at the sites of homology. The frequency of homologous recombination is influenced by a number of factors. Different organisms vary with respect to the amount of homologous recombination and the relative proportion of homologous to non-homologous recombination. Generally, the length of the region of homology affects the frequency of homologous recombination events: the longer the region of homology, the greater the frequency. The length of the homology region needed to observe homologous recombination is also species-variable. In many cases, at least 5 kb of homology has been utilized, but homologous recombination has been observed with as little as 25-50 bp of homology. See, for example, Singer et al., (1982) Cell 31:25-33; Shen and Huang, (1986) Genetics 112:441-57; Watt et al., (1985) Proc. Natl. Acad. Sci. USA 82:4768-72, Sugawara and Haber, (1992) Mol Cell Biol 12:563-75, Rubnitz and Subramani, (1984) Mol Cell Biol 4:2253-8; Ayares et al., (1986) Proc. Natl. Acad. Sci. USA 83:5199-203; Liskay et al., (1987) Genetics 115:161-7.

[0380] “Sequence identity” or “identity” in the context of nucleic acid or polypeptide sequences refers to the nucleic acid bases or amino acid residues in two sequences that are the same when aligned for maximum correspondence over a specified comparison window.

[0381] The term “percentage of sequence identity” refers to the value determined by comparing two optimally aligned sequences over a comparison window, wherein the portion of the polynucleotide or polypeptide sequence in the comparison window may comprise additions or deletions (i.e., gaps) as compared to the reference sequence (which does not comprise additions or deletions) for optimal alignment of the two sequences. The percentage is calculated by determining the number of positions at which the identical nucleic acid base or amino acid residue occurs in both sequences to yield the number of matched positions, dividing the number of matched positions by the total number of positions in the window of comparison and multiplying the results by 100 to yield the percentage of sequence identity. Useful examples of percent sequence identities include, but are not limited to, 50%, 55%, 60%, 65%, 70%, 75%, 80%, 85%, 90%, or 95%, or any percentage from 50% to 100%. These identities can be determined using any of the programs described herein.

[0382] Sequence alignments and percent identity or similarity calculations may be determined using a variety of comparison methods designed to detect homologous sequences including, but not limited to, the MegAlign™ program of the LASERGENE bioinformatics computing suite (DNASTAR Inc., Madison, Wis.). Within the context of this application it will be understood that where sequence analysis software is used for analysis, that the results of the analysis will be based on the “default values” of the program referenced, unless otherwise specified. As used herein “default values” will mean any set of values or parameters that originally load with the software when first initialized.

[0383] The “Clustal V method of alignment” corresponds to the alignment method labeled Clustal V (described by Higgins and Sharp, (1989) CABIOS 5:151-153; Higgins et al., (1992) Comput Appl Biosci 8:189-191) and found in the MegAlign™ program of the LASERGENE bioinformatics computing suite (DNASTAR Inc., Madison, Wis.). For multiple alignments, the default values correspond to GAP PENALTY=10 and GAP LENGTH PENALTY=10. Default parameters for pairwise alignments and calculation of percent identity of protein sequences using the Clustal method are KTUPLE=1, GAP PENALTY=3, WINDOW=5 and DIAGONALS SAVED=5. For nucleic acids these parameters are KTUPLE=2, GAP PENALTY=5, WINDOW=4 and DIAGONALS SAVED=4. After alignment of the sequences using the Clustal V program, it is possible to obtain a “percent identity” by viewing the “sequence distances” table in the same program. The “Clustal W method of alignment” corresponds to the alignment method labeled Clustal W (described by Higgins and Sharp, (1989) CABIOS 5:151-153; Higgins et al., (1992) Comput Appl Biosci 8:189-191) and found in the MegAlign™ v6.1 program of the LASERGENE bioinformatics computing suite (DNASTAR Inc., Madison, WI). Default parameters for multiple alignment (GAP PENALTY=10, GAP LENGTH PENALTY=0.2, Delay Divergen Seqs (%)=30, DNA Transition Weight=0.5, Protein Weight Matrix=Gonnet Series, DNA Weight Matrix=IUB). After alignment of the sequences using the Clustal W program, it is possible to obtain a “percent identity” by viewing the “sequence distances” table in the same program. Unless otherwise stated, sequence identity/similarity values provided herein refer to the value obtained using GAP Version 10 (GCG, Accelrys, San Diego, Calif.) using the following parameters: % identity and % similarity for a nucleotide sequence using a gap creation penalty weight of 50 and a gap length extension penalty weight of 3, and the nwsgapdna.cmp scoring matrix; % identity and % similarity for an amino acid sequence using a GAP creation penalty weight of 8 and a gap length extension penalty of 2, and the BLOSUM62 scoring matrix (Henikoff and Henikoff, (1989) Proc. Natl. Acad. Sci. USA 89:10915). GAP uses the algorithm of Needleman and Wunsch, (1970) J Mol Biol 48:443-53, to find an alignment of two complete sequences that maximizes the number of matches and minimizes the number of gaps. GAP considers all possible alignments and gap positions and creates the alignment with the largest number of matched bases and the fewest gaps, using a gap creation penalty and a gap extension penalty in units of matched bases. “BLAST” is a searching algorithm provided by the National Center for Biotechnology Information (NCBI) used to find regions of similarity between biological sequences. The program compares nucleotide or protein sequences to sequence databases and calculates the statistical significance of matches to identify sequences having sufficient similarity to a query sequence such that the similarity would not be predicted to have occurred randomly. BLAST reports the identified sequences and their local alignment to the query sequence. It is well understood by one skilled in the art that many levels of sequence identity are useful in identifying polypeptides from other species or modified naturally or synthetically wherein such polypeptides have the same or similar function or activity. Useful examples of percent identities include, but are not limited to, 50%, 55%, 60%, 65%, 70%, 75%, 80%, 85%, 90% or 95%, or any percentage from 50% to 100%. Indeed, any amino acid identity from 50% to 100% may be useful in describing the present disclosure, such as 51%, 52%, 53%, 54%, 55%, 56%, 57%, 58%, 59%, 60%, 61%, 62%, 63%, 64%, 65%, 66%, 67%, 68%, 69%, 70%, 71%, 72%, 73%, 74%, 75%, 76%, 77%, 78%, 79%, 80%, 81%, 82%, 83%, 84%, 85%, 86%, 87%, 88%, 89%, 90%, 91%, 92%, 93%, 94%, 95%, 96%, 97%, 98% or 99%.

[0384] Polynucleotide and polypeptide sequences, variants thereof, and the structural relationships of these sequences can be described by the terms “homology”, “homologous”, “substantially identical”, “substantially similar” and “corresponding substantially” which are used interchangeably herein. These refer to polypeptide or nucleic acid sequences wherein changes in one or more amino acids or nucleotide bases do not affect the function of the molecule, such as the ability to mediate gene expression or to produce a certain phenotype. These terms also refer to modification(s) of nucleic acid sequences that do not substantially alter the functional properties of the resulting nucleic acid relative to the initial, unmodified nucleic acid. These modifications include deletion, substitution, and/or insertion of one or more nucleotides in the nucleic acid fragment. Substantially similar nucleic acid sequences encompassed may be defined by their ability to hybridize (under moderately stringent conditions, e.g., 0.5× SSC, 0.1% SDS, 60° C.) with the sequences exemplified herein, or to any portion of the nucleotide sequences disclosed herein and which are functionally equivalent to any of the nucleic acid sequences disclosed herein. Stringency conditions can be adjusted to screen for moderately similar fragments, such as homologous sequences from distantly related organisms, to highly similar fragments, such as genes that duplicate functional enzymes from closely related organisms. Post-hybridization washes determine stringency conditions.

[0385] An “isolated” or “purified” nucleic acid molecule, polynucleotide, polypeptide, or protein, or biologically active portion thereof, is substantially or essentially free from components that normally accompany or interact with the polynucleotide or protein as found in its naturally occurring environment. Thus, an isolated or purified polynucleotide or polypeptide or protein is substantially free of other cellular material, or culture medium when produced by recombinant techniques, or substantially free of chemical precursors or other chemicals when chemically synthesized. Optimally, an “isolated” polynucleotide is free of sequences (optimally protein encoding sequences) that naturally flank the polynucleotide (i.e., sequences located at the 5′ and 3′ ends of the polynucleotide) in the genomic DNA of the organism from which the polynucleotide is derived. For example, in various embodiments, the isolated polynucleotide can comprise less than about 5 kb, four kb, 3 kb, 2 kb, 1 kb, 0.5 kb, or 0.1 kb of nucleotide sequence that naturally flank the polynucleotide in genomic DNA of the cell from which the polynucleotide is derived. Isolated polynucleotides may be purified from a cell in which they naturally occur. Conventional nucleic acid purification methods known to skilled artisans may be used to obtain isolated polynucleotides. The term also embraces recombinant polynucleotides and chemically synthesized polynucleotides.

[0386] The term “fragment” refers to a contiguous set of nucleotides or amino acids. In one embodiment, a fragment is 2, 3, 4, 5, 6, 7 8, 9, 10, 11, 12, 13, 14, 15, 16, 17, 18, 19, 20, or greater than 20 contiguous nucleotides. In one embodiment, a fragment is 2, 3, 4, 5, 6, 7 8, 9, 10, 11, 12, 13, 14, 15, 16, 17, 18, 19, 20, or greater than 20 contiguous amino acids. A fragment may or may not exhibit the function of a sequence sharing some percent identity over the length of said fragment.

[0387] The terms “fragment that is functionally equivalent” and “functionally equivalent fragment” are used interchangeably herein. These terms refer to a portion or subsequence of an isolated nucleic acid fragment or polypeptide that displays the same activity or function as the longer sequence from which it derives. In one example, the fragment retains the ability to alter gene expression or produce a certain phenotype whether or not the fragment encodes an active protein. For example, the fragment can be used in the design of genes to produce the desired phenotype in a modified plant. Genes can be designed for use in suppression by linking a nucleic acid fragment, whether or not it encodes an active enzyme, in the sense or antisense orientation relative to a plant promoter sequence.

[0388] “Gene” includes a nucleic acid fragment that expresses a functional molecule such as, but not limited to, a specific protein, including regulatory sequences preceding (5′ non-coding sequences) and following (3′ non-coding sequences) the coding sequence. “Native gene” refers to a gene as found in its natural endogenous location with its own regulatory sequences.

[0389] By the term “endogenous” it is meant a sequence or other molecule that naturally occurs in a cell or organism. In one aspect, an endogenous polynucleotide is normally found in the genome of a cell; that is, not heterologous.

[0390] An “allele” is one of several alternative forms of a gene occupying a given locus on a chromosome. When all the alleles present at a given locus on a chromosome are the same, that plant is homozygous at that locus. If the alleles present at a given locus on a chromosome differ, that plant is heterozygous at that locus.

[0391] “Coding sequence” refers to a polynucleotide sequence which codes for a specific amino acid sequence. “Regulatory sequences” refer to nucleotide sequences located upstream (5′ non-coding sequences), within, or downstream (3′ non-coding sequences) of a coding sequence, and which influence the transcription, RNA processing or stability, or translation of the associated coding sequence. Regulatory sequences include, but are not limited to, promoters, translation leader sequences, 5′ untranslated sequences, 3′ untranslated sequences, introns, polyadenylation target sequences, RNA processing sites, effector binding sites, and stem-loop structures.

[0392] A “mutated gene” is a gene that has been altered through human intervention. Such a “mutated gene” has a sequence that differs from the sequence of the corresponding non-mutated gene by at least one nucleotide addition, deletion, or substitution. In certain embodiments of the disclosure, the mutated gene comprises an alteration that results from a guide polynucleotide/Cas endonuclease system as disclosed herein. A mutated plant is a plant comprising a mutated gene.

[0393] As used herein, a “targeted mutation” is a mutation in a gene (referred to as the target gene), including a native gene, that was made by altering a target sequence within the target gene using any method known to one skilled in the art, including a method involving a guided Cas endonuclease system as disclosed herein.

[0394] The terms “knock-out”, “gene knock-out” and “genetic knock-out” are used interchangeably herein. A knock-out represents a DNA sequence of a cell that has been rendered partially or completely inoperative by targeting with a Cas protein; for example, a DNA sequence prior to knock-out could have encoded an amino acid sequence, or could have had a regulatory function (e.g., promoter).

[0395] The terms “knock-in”, “gene knock-in”, “gene insertion” and “genetic knock-in” are used interchangeably herein. A knock-in represents the replacement or insertion of a DNA sequence at a specific DNA sequence in cell by targeting with a Cas protein (for example by homologous recombination (HR), wherein a suitable donor DNA polynucleotide is also used). Examples of knock-ins are a specific insertion of a heterologous amino acid coding sequence in a coding region of a gene, or a specific insertion of a transcriptional regulatory element in a genetic locus.

[0396] By “domain” it is meant a contiguous stretch of nucleotides (that can be RNA, DNA, and/or RNA-DNA-combination sequence) or amino acids.

[0397] The term “conserved domain” or “motif” means a set of polynucleotides or amino acids conserved at specific positions along an aligned sequence of evolutionarily related proteins. While amino acids at other positions can vary between homologous proteins, amino acids that are highly conserved at specific positions indicate amino acids that are essential to the structure, the stability, or the activity of a protein. Because they are identified by their high degree of conservation in aligned sequences of a family of protein homologues, they can be used as identifiers, or “signatures”, to determine if a protein with a newly determined sequence belongs to a previously identified protein family.

[0398] A “codon-modified gene” or “codon-preferred gene” or “codon-optimized gene” is a gene having its frequency of codon usage designed to mimic the frequency of preferred codon usage of the host cell.

[0399] An “optimized” polynucleotide is a sequence that has been optimized for improved expression in a particular heterologous host cell.

[0400] A “plant-optimized nucleotide sequence” is a nucleotide sequence that has been optimized for expression in plants, particularly for increased expression in plants. A plant-optimized nucleotide sequence includes a codon-optimized gene. A plant-optimized nucleotide sequence can be synthesized by modifying a nucleotide sequence encoding a protein such as, for example, a Cas endonuclease as disclosed herein, using one or more plant-preferred codons for improved expression. See, for example, Campbell and Gowri (1990) Plant Physiol. 92:1-11 for a discussion of host-preferred codon usage.

[0401] A “promoter” is a region of DNA involved in recognition and binding of RNA polymerase and other proteins to initiate transcription. The promoter sequence comprises proximal and more distal upstream elements, the latter elements often referred to as enhancers. An “enhancer” is a DNA sequence that can stimulate promoter activity, and may be an innate element of the promoter or a heterologous element inserted to enhance the level or tissue-specificity of a promoter. Promoters may be derived in their entirety from a native gene, or be composed of different elements derived from different promoters found in nature, and/or comprise synthetic DNA segments. It is understood by those skilled in the art that different promoters may direct the expression of a gene in different tissues or cell types, or at different stages of development, or in response to different environmental conditions. It is further recognized that since in most cases the exact boundaries of regulatory sequences have not been completely defined, DNA fragments of some variation may have identical promoter activity.

[0402] “3′ non-coding sequences”, “transcription terminator” or “termination sequences” refer to DNA sequences located downstream of a coding sequence and include polyadenylation recognition sequences and other sequences encoding regulatory signals capable of affecting mRNA processing or gene expression. The polyadenylation signal is usually characterized by affecting the addition of polyadenylic acid tracts to the 3′ end of the mRNA precursor. The use of different 3′ non-coding sequences is exemplified by Ingelbrecht et al., (1989) Plant Cell 1:671-680.

[0403] “RNA transcript” refers to the product resulting from RNA polymerase-catalyzed transcription of a DNA sequence. When the RNA transcript is a perfect complimentary copy of the DNA sequence, it is referred to as the primary transcript or pre-mRNA. A RNA transcript is referred to as the mature RNA or mRNA when it is a RNA sequence derived from post-transcriptional processing of the primary transcript pre-mRNA. “Messenger RNA” or “mRNA” refers to the RNA that is without introns and that can be translated into protein by the cell. “cDNA” refers to a DNA that is complementary to, and synthesized from, an mRNA template using the enzyme reverse transcriptase. The cDNA can be single-stranded or converted into double-stranded form using the Klenow fragment of DNA polymerase I. “Sense” RNA refers to RNA transcript that includes the mRNA and can be translated into protein within a cell or in vitro. “Antisense RNA” refers to an RNA transcript that is complementary to all or part of a target primary transcript or mRNA, and that blocks the expression of a target gene (see, e.g., U.S. Pat. No. 5,107,065). The complementarity of an antisense RNA may be with any part of the specific gene transcript, i.e., at the 5′ non-coding sequence, 3′ non-coding sequence, introns, or the coding sequence. “Functional RNA” refers to antisense RNA, ribozyme RNA, or other RNA that may not be translated but yet has an effect on cellular processes. The terms “complement” and “reverse complement” are used interchangeably herein with respect to mRNA transcripts, and are meant to define the antisense RNA of the message.

[0404] The term “genome” refers to the entire complement of genetic material (genes and non-coding sequences) that is present in each cell of an organism, or virus or organelle; and/or a complete set of chromosomes inherited as a (haploid) unit from one parent.

[0405] The term “operably linked” refers to the association of nucleic acid sequences on a single nucleic acid fragment so that the function of one is regulated by the other. For example, a promoter is operably linked with a coding sequence when it is capable of regulating the expression of that coding sequence (i.e., the coding sequence is under the transcriptional control of the promoter). Coding sequences can be operably linked to regulatory sequences in a sense or antisense orientation. In another example, the complementary RNA regions can be operably linked, either directly or indirectly, 5′ to the target mRNA, or 3′ to the target mRNA, or within the target mRNA, or a first complementary region is 5′ and its complement is 3′ to the target mRNA.

[0406] Generally, “host” refers to an organism or cell into which a heterologous component (polynucleotide, polypeptide, other molecule, cell) has been introduced. As used herein, a “host cell” refers to an in vivo or in vitro eukaryotic cell, prokaryotic cell (e.g., bacterial or archaeal cell), or cell from a multicellular organism (e.g., a cell line) cultured as a unicellular entity, into which a heterologous polynucleotide or polypeptide has been introduced. In some embodiments, the cell is selected from the group consisting of: an archaeal cell, a bacterial cell, a eukaryotic cell, a eukaryotic single-cell organism, a somatic cell, a germ cell, a stem cell, a plant cell, an algal cell, an animal cell, in invertebrate cell, a vertebrate cell, a fish cell, a frog cell, a bird cell, an insect cell, a mammalian cell, a pig cell, a cow cell, a goat cell, a sheep cell, a rodent cell, a rat cell, a mouse cell, a non-human primate cell, and a human cell. In some cases, the cell is in vitro. In some cases, the cell is in vivo.

[0407] The term “recombinant” refers to an artificial combination of two otherwise separated segments of sequence, e.g., by chemical synthesis, or manipulation of isolated segments of nucleic acids by genetic engineering techniques.

[0408] The terms “plasmid”, “vector” and “cassette” refer to a linear or circular extra chromosomal element often carrying genes that are not part of the central metabolism of the cell, and usually in the form of double-stranded DNA. Such elements may be autonomously replicating sequences, genome integrating sequences, phage, or nucleotide sequences, in linear or circular form, of a single- or double-stranded DNA or RNA, derived from any source, in which a number of nucleotide sequences have been joined or recombined into a unique construction which is capable of introducing a polynucleotide of interest into a cell. “Transformation cassette” refers to a specific vector comprising a gene and having elements in addition to the gene that facilitates transformation of a particular host cell. “Expression cassette” refers to a specific vector comprising a gene and having elements in addition to the gene that allow for expression of that gene in a host.

[0409] The terms “recombinant DNA molecule”, “recombinant DNA construct”, “expression construct”, “construct”, and “recombinant construct” are used interchangeably herein. A recombinant DNA construct comprises an artificial combination of nucleic acid sequences, e.g., regulatory and coding sequences that are not all found together in nature. For example, a recombinant DNA construct may comprise regulatory sequences and coding sequences that are derived from different sources, or regulatory sequences and coding sequences derived from the same source, but arranged in a manner different than that found in nature. Such a construct may be used by itself or may be used in conjunction with a vector. If a vector is used, then the choice of vector is dependent upon the method that will be used to introduce the vector into the host cells as is well known to those skilled in the art. For example, a plasmid vector can be used. The skilled artisan is well aware of the genetic elements that must be present on the vector in order to successfully transform, select and propagate host cells. The skilled artisan will also recognize that different independent transformation events may result in different levels and patterns of expression (Jones et al., (1985) EMBO J4:2411-2418; De Almeida et al., (1989) Mol Gen Genetics 218:78-86), and thus that multiple events are typically screened in order to obtain lines displaying the desired expression level and pattern. Such screening may be accomplished standard molecular biological, biochemical, and other assays including Southern analysis of DNA, Northern analysis of mRNA expression, PCR, real time quantitative PCR (qPCR), reverse transcription PCR (RT-PCR), immunoblotting analysis of protein expression, enzyme or activity assays, and/or phenotypic analysis.

[0410] The term “heterologous” refers to the difference between the original environment, location, or composition of a particular polynucleotide or polypeptide sequence and its current environment, location, or composition. Non-limiting examples include differences in taxonomic derivation (e.g., a polynucleotide sequence obtained from Zea mays would be heterologous if inserted into the genome of an Oryza sativa plant, or of a different variety or cultivar of Zea mays; or a polynucleotide obtained from a bacterium was introduced into a cell of a plant), or sequence (e.g., a polynucleotide sequence obtained from Zea mays, isolated, modified, and re-introduced into a maize plant). As used herein, “heterologous” in reference to a sequence can refer to a sequence that originates from a different species, variety, foreign species, or, if from the same species, is substantially modified from its native form in composition and/or genomic locus by deliberate human intervention. For example, a promoter operably linked to a heterologous polynucleotide is from a species different from the species from which the polynucleotide was derived, or, if from the same/analogous species, one or both are substantially modified from their original form and/or genomic locus, or the promoter is not the native promoter for the operably linked polynucleotide. Alternatively, one or more regulatory region(s) and/or a polynucleotide provided herein may be entirely synthetic.

[0411] The term “expression”, as used herein, refers to the production of a functional end-product (e.g., an mRNA, guide RNA, or a protein) in either precursor or mature form.

[0412] A “mature” protein refers to a post-translationally processed polypeptide (i.e., one from which any pre- or propeptides present in the primary translation product have been removed).

[0413] “Precursor” protein refers to the primary product of translation of mRNA (i.e., with pre- and propeptides still present). Pre- and propeptides may be but are not limited to intracellular localization signals.

[0414] “CRISPR” (Clustered Regularly Interspaced Short Palindromic Repeats) loci refers to certain genetic loci encoding components of DNA cleavage systems, for example, used by bacterial and archaeal cells to destroy foreign DNA (Horvath and Barrangou, 2010, Science 327:167-170; WO2007025097, published 1 Mar. 2007). A CRISPR locus can comprise of a CRISPR array, comprising short direct repeats (CRISPR repeats) separated by short variable DNA sequences (called spacers), which can be flanked by diverse Cas (CRISPR-associated) genes.

[0415] As used herein, an “effector” or “effector protein” is a protein that encompasses an activity including recognizing, binding to, and/or cleaving or nicking a polynucleotide target. An effector, or effector protein, may also be an endonuclease. The “effector complex” of a CRISPR system includes Cas proteins involved in crRNA and target recognition and binding. Some of the component Cas proteins may additionally comprise domains involved in target polynucleotide cleavage.

[0416] The term “Cas protein” refers to a polypeptide encoded by a Cas (CRISPR-associated) gene. A Cas protein includes but is not limited to: Cas9, Cpf1 (Cas12), C2c1, C2c2, C2c3, Cas3, Cas3-HD, Cas 5, Cas6, Cas7, Cas8, Cas8a, Cas8b, Cas8c, Cas8d, Cas8e, Cas8f, Cas10, Cse1, Cse2, or combinations or complexes or variants of these. A Cas protein may be a “Cas endonuclease” or “Cas effector protein”, that when in complex with a suitable polynucleotide component, is capable of recognizing, binding to, and optionally nicking or cleaving all or part of a specific polynucleotide target sequence. A Cas endonuclease described herein comprises one or more nuclease domains. A Cas protein, which may in some cases be a Cas effector protein or Cas endonuclease, is further defined as a functional fragment or functional variant of a native Cas protein, or a protein that shares at least 50%, between 50% and 55%, at least 55%, between 55% and 60%, at least 60%, between 60% and 65%, at least 65%, between 65% and 70%, at least 70%, between 70% and 75%, at least 75%, between 75% and 80%, at least 80%, between 80% and 85%, at least 85%, between 85% and 90%, at least 90%, between 90% and 95%, at least 95%, between 95% and 96%, at least 96%, between 96% and 97%, at least 97%, between 97% and 98%, at least 98%, between 98% and 99%, at least 99%, between 99% and 100%, or 100% sequence identity with at least 50, between 50 and 100, at least 100, between 100 and 150, at least 150, between 150 and 200, at least 200, between 200 and 250, at least 250, between 250 and 300, at least 300, between 300 and 350, at least 350, between 350 and 400, at least 400, between 400 and 450, at least 500, or greater than 500 contiguous amino acids of a native Cas protein, and retains at least partial activity.

[0417] A “functional fragment ”, “fragment that is functionally equivalent” and “functionally equivalent fragment” of a Cas endonuclease are used interchangeably herein, and refer to a portion or subsequence of the Cas endonuclease of the present disclosure in which the ability to recognize, bind to, and optionally unwind, nick or cleave (introduce a single or double-strand break in) the target site is retained. The portion or subsequence of the Cas endonuclease can comprise a complete or partial (functional) peptide of any of its domains such as for example, but not limiting to a complete of functional part of a Cas3 HD domain, a complete of functional part of a Cas3 Helicase domain, or a complete of functional part of a cascade protein (such as but not limiting to a Cas5, Cas7, and Cas8, or any variation of those components).

[0418] The terms “functional variant”, “variant that is functionally equivalent” and “functionally equivalent variant” of a Cas protein or endonuclease, including Cas proteins described herein, are used interchangeably herein, and refer to a variant of the Cas protein in which the ability to perform its native function (e.g., recognize, bind, unwind, nick, or cleave all or part of a target sequence) is retained.

[0419] A Cas endonuclease may also include a multifunctional Cas endonuclease. The term “multifunctional Cas endonuclease” and “multifunctional Cas endonuclease polypeptide” are used interchangeably herein and includes reference to a single polypeptide that has Cas endonuclease functionality (comprising at least one protein domain that can act as a Cas endonuclease) and at least one other functionality, such as but not limited to, the functionality to form a cascade (comprises at least a second protein domain that can form a cascade with other proteins). In one aspect, the multifunctional Cas endonuclease comprises at least one additional protein domain relative (either internally, upstream (5′), downstream (3′), or both internally 5′ and 3′, or any combination thereof) to those domains typical of a Cas endonuclease.

[0420] The terms “cascade”, “Cascade”, and “cascade complex” are used interchangeably herein. cascade (CRISPR-associated complex for antiviral defense) comprises a plurality of proteins that interact to form a complex. Cascade can assemble with a polynucleotide, to form a polynucleotide-protein complex (PNP). Cascade relies on the polynucleotide for complex assembly and stability, and for the identification of target nucleic acid sequences. Cascade functions as a surveillance complex that finds and optionally binds target nucleic acids that are complementary to a variable targeting domain of the guide polynucleotide.

[0421] The terms “cleavage-ready cascade”, “crCascade”, “cleavage-ready cascade complex”, “crCascade complex”, “cleavage-ready cascade system”, “CRC” and “crCascade system”, are used interchangeably herein and include reference to a multi-subunit protein complex that can assemble with a polynucleotide forming a polynucleotide-protein complex (PNP), wherein one of the cascade proteins is a Cas endonuclease capable of recognizing, binding to, and optionally unwinding, nicking, or cleaving all or part of a target sequence.

[0422] The terms “5′-cap” and “7-methylguanylate (m7G) cap” are used interchangeably herein. A 7-methylguanylate residue is located on the 5′ terminus of messenger RNA (mRNA) in eukaryotes. RNA polymerase II (PolII) transcribes mRNA in eukaryotes. Messenger RNA capping occurs generally as follows: The most terminal 5′ phosphate group of the mRNA transcript is removed by RNA terminal phosphatase, leaving two terminal phosphates. A guanosine monophosphate (GMP) is added to the terminal phosphate of the transcript by a guanylyl transferase, leaving a 5′-5′ triphosphate-linked guanine at the transcript terminus. Finally, the 7-nitrogen of this terminal guanine is methylated by a methyl transferase.

[0423] The terminology “not having a 5′-cap” herein is used to refer to RNA having, for example, a 5′-hydroxyl group instead of a 5′-cap. Such RNA can be referred to as “uncapped RNA”, for example. Uncapped RNA can better accumulate in the nucleus following transcription, since 5′-capped RNA is subject to nuclear export. One or more RNA components herein are uncapped.

[0424] As used herein, the term “guide polynucleotide”, relates to a polynucleotide sequence that can form a complex with a Cas endonuclease, including the Cas endonuclease described herein, and enables the Cas endonuclease to recognize, optionally bind to, and optionally cleave a DNA target site. The guide polynucleotide sequence can be a RNA sequence, a DNA sequence, or a combination thereof (a RNA-DNA combination sequence).

[0425] The terms “functional fragment”, “fragment that is functionally equivalent” and “functionally equivalent fragment” of a guide RNA, crRNA or tracrRNA are used interchangeably herein, and refer to a portion or subsequence of the guide RNA, crRNA or tracrRNA, respectively, of the present disclosure in which the ability to function as a guide RNA, crRNA or tracrRNA, respectively, is retained.

[0426] The terms “functional variant ”, “variant that is functionally equivalent” and “functionally equivalent variant” of a guide RNA, crRNA or tracrRNA (respectively) are used interchangeably herein, and refer to a variant of the guide RNA, crRNA or tracrRNA, respectively, of the present disclosure in which the ability to function as a guide RNA, crRNA or tracrRNA, respectively, is retained.

[0427] The terms “single guide RNA” and “sgRNA” are used interchangeably herein and relate to a synthetic fusion of two RNA molecules, a crRNA (CRISPR RNA) comprising a variable targeting domain (linked to a tracr mate sequence that hybridizes to a tracrRNA), fused to a tracrRNA (trans-activating CRISPR RNA). The single guide RNA can comprise a crRNA or crRNA fragment and a tracrRNA or tracrRNA fragment of the type II CRISPR/Cas system that can form a complex with a type II Cas endonuclease, wherein said guide RNA/Cas endonuclease complex can direct the Cas endonuclease to a DNA target site, enabling the Cas endonuclease to recognize, optionally bind to, and optionally nick or cleave (introduce a single or double-strand break) the DNA target site.

[0428] The term “variable targeting domain” or “VT domain” is used interchangeably herein and includes a nucleotide sequence that can hybridize (is complementary) to one strand (nucleotide sequence) of a double strand DNA target site. The percent complementation between the first nucleotide sequence domain (VT domain) and the target sequence can be at least 50%, 51%, 52%, 53%, 54%, 55%, 56%, 57%, 58%, 59%, 60%, 61%, 62%, 63%, 63%, 65%, 66%, 67%, 68%, 69%, 70%, 71%, 72%, 73%, 74%, 75%, 76%, 77%, 78%, 79%, 80%, 81%, 82%, 83%, 84%, 85%, 86%, 87%, 88%, 89%, 90%, 91%, 92%, 93%, 94%, 95%, 96%, 97%, 98%, 99% or 100%. The variable targeting domain can be at least 12, 13, 14, 15, 16, 17, 18, 19, 20, 21, 22, 23, 24, 25, 26, 27, 28, 29 or 30 nucleotides in length. In some embodiments, the variable targeting domain comprises a contiguous stretch of 12 to 30 nucleotides. The variable targeting domain can be composed of a DNA sequence, a RNA sequence, a modified DNA sequence, a modified RNA sequence, or any combination thereof.

[0429] The term “Cas endonuclease recognition domain” or “CER domain” (of a guide polynucleotide) is used interchangeably herein and includes a nucleotide sequence that interacts with a Cas endonuclease polypeptide. A CER domain comprises a (trans-acting) tracrNucleotide mate sequence followed by a tracrNucleotide sequence. The CER domain can be composed of a DNA sequence, a RNA sequence, a modified DNA sequence, a modified RNA sequence (see for example US20150059010A1, published 26 Feb. 2015), or any combination thereof.

[0430] As used herein, the terms “guide polynucleotide/Cas endonuclease complex”, “guide polynucleotide/Cas endonuclease system”, “ guide polynucleotide/Cas complex”, “guide polynucleotide/Cas system” and “guided Cas system” “Polynucleotide-guided endonuclease”, “PGEN” are used interchangeably herein and refer to at least one guide polynucleotide and at least one Cas endonuclease, that are capable of forming a complex, wherein said guide polynucleotide/Cas endonuclease complex can direct the Cas endonuclease to a DNA target site, enabling the Cas endonuclease to recognize, bind to, and optionally nick or cleave (introduce a single or double-strand break) the DNA target site. A guide polynucleotide/Cas endonuclease complex herein can comprise Cas protein(s) and suitable polynucleotide component(s) of any of the known CRISPR systems (Horvath and Barrangou, 2010, Science 327:167-170; Makarova et al. 2015, Nature Reviews Microbiology Vol. 13:1-15; Zetsche et al., 2015, Cell 163, 1-13; Shmakov et al., 2015, Molecular Cell 60, 1-13).

[0431] The terms “guide RNA/Cas endonuclease complex”, “guide RNA/Cas endonuclease system”, “guide RNA/Cas complex”, “guide RNA/Cas system”, “gRNA/Cas complex”, “gRNA/Cas system”, “RNA-guided endonuclease”, “RGEN” are used interchangeably herein and refer to at least one RNA component and at least one Cas endonuclease that are capable of forming a complex , wherein said guide RNA/Cas endonuclease complex can direct the Cas endonuclease to a DNA target site, enabling the Cas endonuclease to recognize, bind to, and optionally nick or cleave (introduce a single or double-strand break) the DNA target site.

[0432] The terms “target site”, “target sequence”, “target site sequence”, “target DNA”, “target locus”, “genomic target site”, “genomic target sequence”, “genomic target locus” and “protospacer”, are used interchangeably herein and refer to a polynucleotide sequence such as, but not limited to, a nucleotide sequence on a chromosome, episome, a locus, or any other DNA molecule in the genome (including chromosomal, chloroplastic, mitochondrial DNA, plasmid DNA) of a cell, at which a guide polynucleotide/Cas endonuclease complex can recognize, bind to, and optionally nick or cleave . The target site can be an endogenous site in the genome of a cell, or alternatively, the target site can be heterologous to the cell and thereby not be naturally occurring in the genome of the cell, or the target site can be found in a heterologous genomic location compared to where it occurs in nature. As used herein, terms “endogenous target sequence” and “native target sequence” are used interchangeable herein to refer to a target sequence that is endogenous or native to the genome of a cell and is at the endogenous or native position of that target sequence in the genome of the cell. An “artificial target site” or “artificial target sequence” are used interchangeably herein and refer to a target sequence that has been introduced into the genome of a cell. Such an artificial target sequence can be identical in sequence to an endogenous or native target sequence in the genome of a cell but be located in a different position (i.e., a non-endogenous or non-native position) in the genome of a cell.

[0433] A “protospacer adjacent motif” (PAM) herein refers to a short nucleotide sequence adjacent to a target sequence (protospacer) that is recognized (targeted) by a guide polynucleotide/Cas endonuclease system described herein. The Cas endonuclease may not successfully recognize a target DNA sequence if the target DNA sequence is not followed by a PAM sequence. The sequence and length of a PAM herein can differ depending on the Cas protein or Cas protein complex used. The PAM sequence can be of any length but is typically 1, 2, 3, 4, 5, 6, 7, 8, 9, 10, 11, 12, 13, 14, 15, 16, 17, 18, 19 or 20 nucleotides long.

[0434] An “altered target site”, “altered target sequence”, “modified target site”, “modified target sequence” are used interchangeably herein and refer to a target sequence as disclosed herein that comprises at least one alteration when compared to non-altered target sequence. Such “modifications” include, for example: replacement of at least one nucleotide, a deletion of at least one nucleotide, an insertion of at least one nucleotide, a substitution of at least one nucleotide, a chemical modification or chemical alteration of at least one nucleotide (e.g., the addition, deletion, or substitution of at least one atom), or any combination of the preceding. The terms “altered” and “modified” and their derivatives are used interchangeably.

[0435] A “modified nucleotide” or “edited nucleotide” refers to a nucleotide sequence of interest that comprises at least one alteration when compared to its non-modified nucleotide sequence. Such “modifications” include, for example: replacement of at least one nucleotide, a deletion of at least one nucleotide, an insertion of at least one nucleotide, a substitution of at least one nucleotide, a chemical modification or chemical alteration of at least one nucleotide (e.g., the addition, deletion, or substitution of at least one atom), or any combination of the preceding.

[0436] Methods for “modifying a target site” and “altering a target site” are used interchangeably herein and refer to methods for producing an altered target site.

[0437] As used herein, “donor DNA” is a DNA construct that comprises a polynucleotide of interest to be inserted into the target site of a Cas endonuclease.

[0438] The term “polynucleotide modification template” includes a polynucleotide that comprises at least one nucleotide modification when compared to the nucleotide sequence to be edited. A nucleotide modification can be at least one nucleotide substitution, addition or deletion. Optionally, the polynucleotide modification template can further comprise homologous nucleotide sequences flanking the at least one nucleotide modification, wherein the flanking homologous nucleotide sequences provide sufficient homology to the desired nucleotide sequence to be edited.

[0439] The term “plant-optimized Cas endonuclease” herein refers to a Cas protein, including a multifunctional Cas protein, encoded by a nucleotide sequence that has been optimized for expression in a plant cell or plant.

[0440] A “plant-optimized nucleotide sequence encoding a Cas endonuclease”, “plant-optimized construct encoding a Cas endonuclease” and a “plant-optimized polynucleotide encoding a Cas endonuclease” are used interchangeably herein and refer to a nucleotide sequence encoding a Cas protein, or a variant or functional fragment thereof, that has been optimized for expression in a plant cell or plant. A plant comprising a plant-optimized Cas endonuclease includes a plant comprising the nucleotide sequence encoding for the Cas sequence and/or a plant comprising the Cas endonuclease protein. In one aspect, the plant-optimized Cas endonuclease nucleotide sequence is a , rice-optimized, wheat-optimized, soybean-optimized, cotton-optimized, or canola-optimized Cas endonuclease.

[0441] The term “plant” generically includes whole plants, plant organs, plant tissues, seeds, plant cells, seeds and progeny of the same. Plant cells include, without limitation, cells from seeds, suspension cultures, embryos, meristematic regions, callus tissue, leaves, roots, shoots, gametophytes, sporophytes, pollen and microspores. A “plant element” is intended to reference either a whole plant or a plant component, which may comprise differentiated and/or undifferentiated tissues, for example but not limited to plant tissues, parts, and cell types. In one embodiment, a plant element is one of the following: whole plant, seedling, meristematic tissue, ground tissue, vascular tissue, dermal tissue, seed, leaf, root, shoot, stem, flower, fruit, stolon, bulb, tuber, corm, keiki, shoot, bud, tumor tissue, and various forms of cells and culture (e.g., single cells, protoplasts, embryos, callus tissue). The term “plant organ” refers to plant tissue or a group of tissues that constitute a morphologically and functionally distinct part of a plant. As used herein, a “plant element” is synonymous to a “portion” of a plant, and refers to any part of the plant, and can include distinct tissues and/or organs, and may be used interchangeably with the term “tissue” throughout. Similarly, a “plant reproductive element” is intended to generically reference any part of a plant that is able to initiate other plants via either sexual or asexual reproduction of that plant, for example but not limited to: seed, seedling, root, shoot, cutting, scion, graft, stolon, bulb, tuber, corm, keiki, or bud. The plant element may be in plant or in a plant organ, tissue culture, or cell culture.

[0442] “Progeny” comprises any subsequent generation of a plant.

[0443] As used herein, the term “plant part” refers to plant cells, plant protoplasts, plant cell tissue cultures from which plants can be regenerated, plant calli, plant clumps, and plant cells that are intact in plants or parts of plants such as embryos, pollen, ovules, seeds, leaves, flowers, branches, fruit, kernels, ears, cobs, husks, stalks, roots, root tips, anthers, and the like, as well as the parts themselves. Grain is intended to mean the mature seed produced by commercial growers for purposes other than growing or reproducing the species. Progeny, variants, and mutants of the regenerated plants are also included within the scope of the invention, provided that these parts comprise the introduced polynucleotides.

[0444] The term “monocotyledonous” or “monocot” refers to the subclass of angiosperm plants also known as “monocotyledoneae”, whose seeds typically comprise only one embryonic leaf, or cotyledon. The term includes references to whole plants, plant elements, plant organs (e.g., leaves, stems, roots, etc.), seeds, plant cells, and progeny of the same.

[0445] The term “dicotyledonous” or “dicot” refers to the subclass of angiosperm plants also knows as “dicotyledoneae”, whose seeds typically comprise two embryonic leaves, or cotyledons. The term includes references to whole plants, plant elements, plant organs (e.g., leaves, stems, roots, etc.), seeds, plant cells, and progeny of the same.

[0446] The term “non-conventional yeast” herein refers to any yeast that is not a Saccharomyces (e.g., S. cerevisiae) or Schizosaccharomyces yeast species. (see “Non-Conventional Yeasts in Genetics, Biochemistry and Biotechnology: Practical Protocols”, K. Wolf, K. D. Breunig, G. Barth, Eds., Springer-Verlag, Berlin, Germany, 2003).

[0447] The term “crossed” or “cross” or “crossing” in the context of this disclosure means the fusion of gametes via pollination to produce progeny (i.e., cells, seeds, or plants). The term encompasses both sexual crosses (the pollination of one plant by another) and selfing (self-pollination, i.e., when the pollen and ovule (or microspores and megaspores) are from the same plant or genetically identical plants).

[0448] The term “introgression” refers to the transmission of a desired allele of a genetic locus from one genetic background to another. For example, introgression of a desired allele at a specified locus can be transmitted to at least one progeny plant via a sexual cross between two parent plants, where at least one of the parent plants has the desired allele within its genome. Alternatively, for example, transmission of an allele can occur by recombination between two donor genomes, e.g., in a fused protoplast, where at least one of the donor protoplasts has the desired allele in its genome. The desired allele can be, e.g., a transgene, a modified (mutated or edited) native allele, or a selected allele of a marker or QTL.

[0449] The term “isoline” is a comparative term, and references organisms that are genetically identical, but differ in treatment. In one example, two genetically identical maize plant embryos may be separated into two different groups, one receiving a treatment (such as the introduction of a CRISPR-Cas effector endonuclease) and one control that does not receive such treatment. Any phenotypic differences between the two groups may thus be attributed solely to the treatment and not to any inherency of the plant's endogenous genetic makeup.

[0450] “Introducing” is intended to mean presenting to a target, such as a cell or organism, a polynucleotide or polypeptide or polynucleotide-protein complex, in such a manner that the component(s) gains access to the interior of a cell of the organism or to the cell itself

[0451] A “polynucleotide of interest” includes any nucleotide sequence encoding a protein or polypeptide that improves desirability of a host cell, plant, or crops. In some aspects, this includes, a trait of agronomic interest. Polynucleotides of interest: include, but are not limited to: markers, phenotypic characteristics, polynucleotides encoding important traits for agronomics (“traits of agronomic importance” or “traits of agronomic interest”): herbicide-resistance, insecticidal resistance, disease resistance, nematode resistance, herbicide resistance, microbial resistance, fungal resistance, viral resistance, fertility or sterility, grain characteristics, commercial products, phenotypic marker, or any other trait of agronomic or commercial importance. A polynucleotide of interest may additionally be utilized in either the sense or anti-sense orientation. Further, more than one polynucleotide of interest may be utilized together, or “stacked”, to provide additional benefit.

[0452] A “complex trait locus” includes a genomic locus that has multiple transgenes genetically linked to each other.

[0453] The compositions and methods herein may provide for an improved “agronomic trait” or “trait of agronomic importance” or “trait of agronomic interest” to a plant, which may include, but not be limited to, the following: disease resistance, drought tolerance, heat tolerance, cold tolerance, salinity tolerance, metal tolerance, herbicide tolerance, improved water use efficiency, improved nitrogen utilization, improved nitrogen fixation, pest resistance, herbivore resistance, pathogen resistance, yield improvement, health enhancement, vigor improvement, growth improvement, photosynthetic capability improvement, nutrition enhancement, altered protein content, altered oil content, increased biomass, increased shoot length, increased root length, improved root architecture, modulation of a metabolite, modulation of the proteome, increased seed weight, altered seed carbohydrate composition, altered seed oil composition, altered seed protein composition, altered seed nutrient composition, as compared to an isoline plant not comprising a modification derived from the methods or compositions herein.

[0454] “Agronomic trait potential” is intended to mean a capability of a plant element for exhibiting a phenotype, preferably an improved agronomic trait, at some point during its life cycle, or conveying said phenotype to another plant element with which it is associated in the same plant.

[0455] The terms “decreased,” “fewer,” “slower” and “increased” “faster” “enhanced” “greater” as used herein refers to a decrease or increase in a characteristic of the modified plant element or resulting plant compared to an unmodified plant element or resulting plant. For example, a decrease in a characteristic may be at least 1%, at least 2%, at least 3%, at least 4%, at least 5%, between 5% and 10%, at least 10%, between 10% and 20%, at least 15%, at least 20%, between 20% and 30%, at least 25%, at least 30%, between 30% and 40%, at least 35%, at least 40%, between 40% and 50%, at least 45%, at least 50%, between 50% and 60%, at least about 60%, between 60% and 70%, between 70% and 80%, at least 75%, at least about 80%, between 80% and 90%, at least about 90%, between 90% and 100%, at least 100%, between 100% and 200%, at least 200%, at least about 300%, at least about 400%) or more lower than the untreated control and an increase may be at least 1%, at least 2%, at least 3%, at least 4%, at least 5%, between 5% and 10%, at least 10%, between 10% and 20%, at least 15%, at least 20%, between 20% and 30%, at least 25%, at least 30%, between 30% and 40%, at least 35%, at least 40%, between 40% and 50%, at least 45%, at least 50%, between 50% and 60%, at least about 60%, between 60% and 70%, between 70% and 80%, at least 75%, at least about 80%, between 80% and 90%, at least about 90%, between 90% and 100%, at least 100%, between 100% and 200%, at least 200%, at least about 300%, at least about 400% or more higher than the untreated control.

[0456] As used herein, the term “before”, in reference to a sequence position, refers to an occurrence of one sequence upstream, or 5′, to another sequence.

[0457] The meaning of abbreviations is as follows: “sec” means second(s), “min” means minute(s), “h” means hour(s), “d” means day(s), “μL” means microliter(s), “mL” means milliliter(s), “L” means liter(s), “μM” means micromolar, “mM” means millimolar, “M” means molar, “mmol” means millimole(s), “μmole” or “umole” mean micromole(s), “g” means gram(s), “μg” or “ug” means microgram(s), “ng” means nanogram(s), “U” means unit(s), “bp” means base pair(s) and “kb” means kilobase(s).

### Classification of CRISPR-Cas Systems

[0458] CRISPR-Cas systems have been classified according to sequence and structural analysis of components. Multiple CRISPR/Cas systems have been described including Class 1 systems, with multisubunit effector complexes (comprising type I, type III, and type IV), and Class 2 systems, with single protein effectors (comprising type II, type V, and type VI) (Makarova et al. 2015, Nature Reviews Microbiology Vol. 13:1-15; Zetsche et al., 2015, Cell 163, 1-13; Shmakov et al., 2015, Molecular Cell 60, 1-13; Haft et al., 2005, Computational Biology, PLoS Comput Biol 1(6): e60; and Koonin et al. 2017, Curr Opinion Microbiology 37:67-78).

### CRISPR-Cas System Components

### Cas Proteins

[0459] A number of proteins may be encoded in the CRISPR cas operon, including those involved in adaptation (spacer insertion), interference (effector module target binding, target nicking or cleavage—e.g. endonuclease activity), expression (pre-crRNA processing), regulation, or other.

[0460] Two proteins, Casl and Cas2, are conserved among many CRISPR systems (for example, as described in Koonin et al., Curr Opinion Microbiology 37:67-78, 2017). Casl is a metal-dependent DNA-specific endonuclease that produces double-stranded DNA fragments. In some systems Cas1 forms a stable complex with Cas2, which is essential to spacer acquisition and insertion for CRISPR systems (Nunez et al., Nature Str Mol Biol 21:528-534, 2014).

[0461] A number of other proteins have been identified across different systems, including Cas4 (which may have similarity to a RecB nuclease) and is thought to play a role in the capture of new viral DNA sequences for incorporation into the CRISPR array (Zhang et al., PLOS One 7(10):e47232, 2012).

[0462] Some proteins may encompass a plurality of functions. For example, Cas9, the signature protein of Class 2 type II systems, has been demonstrated to be involved in pre-crRNA processing, target binding, as well as target cleavage.

[0463] In the Type I-E system, the cas operon comprises, as shown in FIG. 1, genes encoding: an endonuclease (Cas3), five proteins that assemble to form the cascade (Cse1, Cse2, Cas7, Cas5, and Cas6), Cas1, and Cas2. The CRISPR locus further comprises a CRISPR array comprising a series of repeats and spacers. Within cascade, Cas5, Cas7, Cse1, and Cse2 are involved in DNA target recognition. Cas 6 is involved in CRISPR RNA maturation. Equivalent terminology for Cse1 includes Cas8, Cas8e, and CasA.

[0464] In some aspects, Cas5 is a polypeptide sequence that shares at least 50%, between 50% and 55%, at least 55%, between 55% and 60%, at least 60%, between 60% and 65%, at least 65%, between 65% and 70%, at least 70%, between 70% and 75%, at least 75%, between 75% and 80%, at least 80%, between 80% and 85%, at least 85%, between 85% and 90%, at least 90%, between 90% and 95%, at least 95%, between 95% and 96%, at least 96%, between 96% and 97%, at least 97%, between 97% and 98%, at least 98%, between 98% and 99%, at least 99%, between 99% and 100%, or 100% sequence identity with at least 50, between 50 and 100, at least 100, between 100 and 150, at least 150, between 150 and 175, at least 175, between 175 and 195, or greater than 195 contiguous amino acids of SEQ ID NO:10. In some aspects, Cas5 is a polypeptide encoded by a polynucleotide sequence that shares at least 50%, between 50% and 55%, at least 55%, between 55% and 60%, at least 60%, between 60% and 65%, at least 65%, between 65% and 70%, at least 70%, between 70% and 75%, at least 75%, between 75% and 80%, at least 80%, between 80% and 85%, at least 85%, between 85% and 90%, at least 90%, between 90% and 95%, at least 95%, between 95% and 96%, at least 96%, between 96% and 97%, at least 97%, between 97% and 98%, at least 98%, between 98% and 99%, at least 99%, between 99% and 100%, or 100% sequence identity with at least 50, between 50 and 100, at least 100, between 100 and 150, at least 150, between 150 and 200, at least 200, between 200 and 250, at least 250, between 250 and 300, at least 300, between 300 and 350, at least 350, between 350 and 400, at least 400, between 400 and 450, or greater than 450 contiguous nucleotides SEQ ID NO:2.

[0465] In some aspects, Cas6 is a polypeptide sequence that shares at least 50%, between 50% and 55%, at least 55%, between 55% and 60%, at least 60%, between 60% and 65%, at least 65%, between 65% and 70%, at least 70%, between 70% and 75%, at least 75%, between 75% and 80%, at least 80%, between 80% and 85%, at least 85%, between 85% and 90%, at least 90%, between 90% and 95%, at least 95%, between 95% and 96%, at least 96%, between 96% and 97%, at least 97%, between 97% and 98%, at least 98%, between 98% and 99%, at least 99%, between 99% and 100%, or 100% sequence identity with at least 50, between 50 and 100, at least 100, between 100 and 150, at least 150, between 150 and 175, at least 175, between 175 and 195, or greater than 195 contiguous amino acids of SEQ ID NO:11. In some aspects, Cas6 is a polypeptide encoded by a polynucleotide sequence that shares at least 50%, between 50% and 55%, at least 55%, between 55% and 60%, at least 60%, between 60% and 65%, at least 65%, between 65% and 70%, at least 70%, between 70% and 75%, at least 75%, between 75% and 80%, at least 80%, between 80% and 85%, at least 85%, between 85% and 90%, at least 90%, between 90% and 95%, at least 95%, between 95% and 96%, at least 96%, between 96% and 97%, at least 97%, between 97% and 98%, at least 98%, between 98% and 99%, at least 99%, between 99% and 100%, or 100% sequence identity with at least 50, between 50 and 100, at least 100, between 100 and 150, at least 150, between 150 and 200, at least 200, between 200 and 250, at least 250, between 250 and 300, at least 300, between 300 and 350, at least 350, between 350 and 400, at least 400, between 400 and 450, or greater than 450 contiguous nucleotides SEQ ID NO:3.

[0466] In some aspects, Cas7 is a polypeptide sequence that shares at least 50%, between 50% and 55%, at least 55%, between 55% and 60%, at least 60%, between 60% and 65%, at least 65%, between 65% and 70%, at least 70%, between 70% and 75%, at least 75%, between 75% and 80%, at least 80%, between 80% and 85%, at least 85%, between 85% and 90%, at least 90%, between 90% and 95%, at least 95%, between 95% and 96%, at least 96%, between 96% and 97%, at least 97%, between 97% and 98%, at least 98%, between 98% and 99%, at least 99%, between 99% and 100%, or 100% sequence identity with at least 50, between 50 and 100, at least 100, between 100 and 150, at least 150, between 150 and 175, at least 175, between 175 and 195, or greater than 195 contiguous amino acids of SEQ ID NO:12. In some aspects, Cas7 is a polypeptide encoded by a polynucleotide sequence that shares at least 50%, between 50% and 55%, at least 55%, between 55% and 60%, at least 60%, between 60% and 65%, at least 65%, between 65% and 70%, at least 70%, between 70% and 75%, at least 75%, between 75% and 80%, at least 80%, between 80% and 85%, at least 85%, between 85% and 90%, at least 90%, between 90% and 95%, at least 95%, between 95% and 96%, at least 96%, between 96% and 97%, at least 97%, between 97% and 98%, at least 98%, between 98% and 99%, at least 99%, between 99% and 100%, or 100% sequence identity with at least 50, between 50 and 100, at least 100, between 100 and 150, at least 150, between 150 and 200, at least 200, between 200 and 250, at least 250, between 250 and 300, at least 300, between 300 and 350, at least 350, between 350 and 400, at least 400, between 400 and 450, or greater than 450 contiguous nucleotides SEQ ID NO:4.

[0467] In some aspects, Cse1 is a polypeptide sequence that shares at least 50%, between 50% and 55%, at least 55%, between 55% and 60%, at least 60%, between 60% and 65%, at least 65%, between 65% and 70%, at least 70%, between 70% and 75%, at least 75%, between 75% and 80%, at least 80%, between 80% and 85%, at least 85%, between 85% and 90%, at least 90%, between 90% and 95%, at least 95%, between 95% and 96%, at least 96%, between 96% and 97%, at least 97%, between 97% and 98%, at least 98%, between 98% and 99%, at least 99%, between 99% and 100%, or 100% sequence identity with at least 50, between 50 and 100, at least 100, between 100 and 150, at least 150, between 150 and 175, at least 175, between 175 and 195, or greater than 195 contiguous amino acids of SEQ ID NO:13. In some aspects, Cse1 is a polypeptide encoded by a polynucleotide sequence that shares at least 50%, between 50% and 55%, at least 55%, between 55% and 60%, at least 60%, between 60% and 65%, at least 65%, between 65% and 70%, at least 70%, between 70% and 75%, at least 75%, between 75% and 80%, at least 80%, between 80% and 85%, at least 85%, between 85% and 90%, at least 90%, between 90% and 95%, at least 95%, between 95% and 96%, at least 96%, between 96% and 97%, at least 97%, between 97% and 98%, at least 98%, between 98% and 99%, at least 99%, between 99% and 100%, or 100% sequence identity with at least 50, between 50 and 100, at least 100, between 100 and 150, at least 150, between 150 and 200, at least 200, between 200 and 250, at least 250, between 250 and 300, at least 300, between 300 and 350, at least 350, between 350 and 400, at least 400, between 400 and 450, or greater than 450 contiguous nucleotides SEQ ID NO:5.

[0468] In some aspects, Cse2 is a polypeptide sequence that shares at least 50%, between 50% and 55%, at least 55%, between 55% and 60%, at least 60%, between 60% and 65%, at least 65%, between 65% and 70%, at least 70%, between 70% and 75%, at least 75%, between 75% and 80%, at least 80%, between 80% and 85%, at least 85%, between 85% and 90%, at least 90%, between 90% and 95%, at least 95%, between 95% and 96%, at least 96%, between 96% and 97%, at least 97%, between 97% and 98%, at least 98%, between 98% and 99%, at least 99%, between 99% and 100%, or 100% sequence identity with at least 50, between 50 and 100, at least 100, between 100 and 150, at least 150, between 150 and 175, at least 175, between 175 and 195, or greater than 195 contiguous amino acids of SEQ ID NO:14. In some aspects, Cse2 is a polypeptide encoded by a polynucleotide sequence that shares at least 50%, between 50% and 55%, at least 55%, between 55% and 60%, at least 60%, between 60% and 65%, at least 65%, between 65% and 70%, at least 70%, between 70% and 75%, at least 75%, between 75% and 80%, at least 80%, between 80% and 85%, at least 85%, between 85% and 90%, at least 90%, between 90% and 95%, at least 95%, between 95% and 96%, at least 96%, between 96% and 97%, at least 97%, between 97% and 98%, at least 98%, between 98% and 99%, at least 99%, between 99% and 100%, or 100% sequence identity with at least 50, between 50 and 100, at least 100, between 100 and 150, at least 150, between 150 and 200, at least 200, between 200 and 250, at least 250, between 250 and 300, at least 300, between 300 and 350, at least 350, between 350 and 400, at least 400, between 400 and 450, or greater than 450 contiguous nucleotides SEQ ID NO:6.

[0469] In some aspects, Casl is a polypeptide sequence that shares at least 50%, between 50% and 55%, at least 55%, between 55% and 60%, at least 60%, between 60% and 65%, at least 65%, between 65% and 70%, at least 70%, between 70% and 75%, at least 75%, between 75% and 80%, at least 80%, between 80% and 85%, at least 85%, between 85% and 90%, at least 90%, between 90% and 95%, at least 95%, between 95% and 96%, at least 96%, between 96% and 97%, at least 97%, between 97% and 98%, at least 98%, between 98% and 99%, at least 99%, between 99% and 100%, or 100% sequence identity with at least 50, between 50 and 100, at least 100, between 100 and 150, at least 150, between 150 and 175, at least 175, between 175 and 195, or greater than 195 contiguous amino acids of SEQ ID NO:16. In some aspects, Casl is a polypeptide encoded by a polynucleotide sequence that shares at least 50%, between 50% and 55%, at least 55%, between 55% and 60%, at least 60%, between 60% and 65%, at least 65%, between 65% and 70%, at least 70%, between 70% and 75%, at least 75%, between 75% and 80%, at least 80%, between 80% and 85%, at least 85%, between 85% and 90%, at least 90%, between 90% and 95%, at least 95%, between 95% and 96%, at least 96%, between 96% and 97%, at least 97%, between 97% and 98%, at least 98%, between 98% and 99%, at least 99%, between 99% and 100%, or 100% sequence identity with at least 50, between 50 and 100, at least 100, between 100 and 150, at least 150, between 150 and 200, at least 200, between 200 and 250, at least 250, between 250 and 300, at least 300, between 300 and 350, at least 350, between 350 and 400, at least 400, between 400 and 450, or greater than 450 contiguous nucleotides SEQ ID NO:8.

[0470] In some aspects, Cas2 is a polypeptide sequence that shares at least 50%, between 50% and 55%, at least 55%, between 55% and 60%, at least 60%, between 60% and 65%, at least 65%, between 65% and 70%, at least 70%, between 70% and 75%, at least 75%, between 75% and 80%, at least 80%, between 80% and 85%, at least 85%, between 85% and 90%, at least 90%, between 90% and 95%, at least 95%, between 95% and 96%, at least 96%, between 96% and 97%, at least 97%, between 97% and 98%, at least 98%, between 98% and 99%, at least 99%, between 99% and 100%, or 100% sequence identity with at least 50, between 50 and 100, at least 100, between 100 and 150, at least 150, between 150 and 175, at least 175, between 175 and 195, or greater than 195 contiguous amino acids of SEQ ID NO:17. In some aspects, Cas2 is a polypeptide encoded by a polynucleotide sequence that shares at least 50%, between 50% and 55%, at least 55%, between 55% and 60%, at least 60%, between 60% and 65%, at least 65%, between 65% and 70%, at least 70%, between 70% and 75%, at least 75%, between 75% and 80%, at least 80%, between 80% and 85%, at least 85%, between 85% and 90%, at least 90%, between 90% and 95%, at least 95%, between 95% and 96%, at least 96%, between 96% and 97%, at least 97%, between 97% and 98%, at least 98%, between 98% and 99%, at least 99%, between 99% and 100%, or 100% sequence identity with at least 50, between 50 and 100, at least 100, between 100 and 150, at least 150, between 150 and 200, at least 200, between 200 and 250, at least 250, between 250 and 300, at least 300, between 300 and 350, at least 350, between 350 and 400, at least 400, between 400 and 450, or greater than 450 contiguous nucleotides SEQ ID NO:9.

### Cas Endonucleases and Effectors

[0471] Endonucleases are enzymes that cleave the phosphodiester bond within a polynucleotide chain, and include restriction endonucleases that cleave DNA at specific sites without damaging the bases. Examples of endonucleases include restriction endonucleases, meganucleases, TAL effector nucleases (TALENs), zinc finger nucleases, and Cas (CRISPR-associated) effector endonucleases.

[0472] Cas endonucleases, either as single effector proteins or in an effector complex with other components, unwind the DNA duplex at the target sequence and optionally cleave at least one DNA strand, as mediated by recognition of the target sequence by a polynucleotide (such as, but not limited to, a crRNA or guide RNA) that is in complex with the Cas effector protein. Such recognition and cutting of a target sequence by a Cas endonuclease typically occurs if the correct protospacer-adjacent motif (PAM) is located at or adjacent to the 3′ end of the DNA target sequence. Alternatively, a Cas endonuclease herein may lack DNA cleavage or nicking activity, but can still specifically bind to a DNA target sequence when complexed with a suitable RNA component.

[0473] Cas endonucleases may occur as individual effectors (Class 2 CRISPR systems) or as part of larger effector complexes (Class I CRISPR systems).

[0474] Cas endonucleases that have been described include, but are not limited to, for example: Cas3 (a feature of Class 1 type I systems), Cas9 (a feature of Class 2 type II systems) and Cas12 (Cpf1) (a feature of Class 2 type V systems).

[0475] Cas3 (and its variants Cas3′ and Cas3″) functions as a single-stranded DNA nuclease (HD domain) and an ATP-dependent helicase. A variant of the Cas3 endonuclease can be obtained by disabling the functional activity of one or both domains of the Cas3 endonuclease polypeptide. Disabling the ATPase dependent helicase activity (by or deletion, knockout of the Cas3-helicase domain or through mutagenesis of critical residues or by assembling the reaction in the absence of ATP as described previously (Sinkunas, T. et al., 2013, EMBO J. 32:385-394) can convert the cleavage ready cascade comprising the modified Cas3 endonuclease into a nickase (as the HD domain is still functional). Disabling the HD endonuclease activity can be accomplished by domain by any method known in the art, such as but not limited to, mutagenesis of critical residues of the HD domain, can convert the cleavage ready cascade comprising the modified Cas3 endonuclease into a helicase. Disabling the both the Cas helicase and Cas3 HD endonuclease activity can be accomplished by any method known in the art, such as but not limited to, mutagenesis of critical residues of both the helicase and HD domains, can convert the cleavage ready cascade comprising the modified Cas3 endonuclease into a binder protein that binds to a target sequence.

[0476] An “engineered Cas3” endonuclease refers a Cas3 protein that has been modified from its original sequence or structure, for example to function as a nickase that may nick one or both strands of a double stranded polynucleotide. When nicking occurs on both strands, the engineered Cas3 endonuclease creates and effective double-strand break (DSB) by virtue of the cooperative nature of nicks on opposite strands: two targets on opposite DNA strands provide opportunity for an effective DSB, that may result in a sticky end 5′ overhang, a sticky end 3′ overhang, a blunt end cut, or a blunt end cut with sticky end overhang(s).

[0477] In some aspects, Cas3 is a polypeptide sequence that shares at least 50%, between 50% and 55%, at least 55%, between 55% and 60%, at least 60%, between 60% and 65%, at least 65%, between 65% and 70%, at least 70%, between 70% and 75%, at least 75%, between 75% and 80%, at least 80%, between 80% and 85%, at least 85%, between 85% and 90%, at least 90%, between 90% and 95%, at least 95%, between 95% and 96%, at least 96%, between 96% and 97%, at least 97%, between 97% and 98%, at least 98%, between 98% and 99%, at least 99%, between 99% and 100%, or 100% sequence identity with at least 50, between 50 and 100, at least 100, between 100 and 150, at least 150, between 150 and 175, at least 175, between 175 and 195, or greater than 195 contiguous amino acids of SEQ ID NO:15. In some aspects, Cas3 is a polypeptide encoded by a polynucleotide sequence that shares at least 50%, between 50% and 55%, at least 55%, between 55% and 60%, at least 60%, between 60% and 65%, at least 65%, between 65% and 70%, at least 70%, between 70% and 75%, at least 75%, between 75% and 80%, at least 80%, between 80% and 85%, at least 85%, between 85% and 90%, at least 90%, between 90% and 95%, at least 95%, between 95% and 96%, at least 96%, between 96% and 97%, at least 97%, between 97% and 98%, at least 98%, between 98% and 99%, at least 99%, between 99% and 100%, or 100% sequence identity with at least 50, between 50 and 100, at least 100, between 100 and 150, at least 150, between 150 and 200, at least 200, between 200 and 250, at least 250, between 250 and 300, at least 300, between 300 and 350, at least 350, between 350 and 400, at least 400, between 400 and 450, or greater than 450 contiguous nucleotides SEQ ID NO:7.

[0478] Type I-E Cas endonucleases and effector proteins can be used for targeted genome editing (via simplex and multiplex double-strand breaks and nicks) and targeted genome regulation (via tethering of epigenetic effector domains to either the Cas protein or sgRNA. A Cas endonuclease can also be engineered to function as an RNA-guided recombinase, and via RNA tethers could serve as a scaffold for the assembly of multiprotein and nucleic acid complexes (Mali et al., 2013, Nature Methods Vol. 10: 957-963).

[0479] A Type I-E Cascade, Cascade protein, Cas endonuclease, effector protein, or functional fragment thereof, for use in the disclosed methods, can be isolated from a native source, or from, a recombinant source where the genetically modified host cell is modified to express the nucleic acid sequence encoding the protein. Alternatively, the Cas protein can be produced using cell free protein expression systems, or be synthetically produced. Effector Cas nucleases may be isolated and introduced into a heterologous cell, or may be modified from its native form to exhibit a different type or magnitude of activity than what it would exhibit in its native source. Such modifications include but are not limited to: fragments, variants, substitutions, deletions, chemical alterations, and insertions.

[0480] Fragments and variants of Cas endonucleases and Cas effector proteins can be obtained via methods such as site-directed mutagenesis and synthetic construction. Methods for measuring endonuclease activity are well known in the art such as, but not limiting to, WO2013166113 published 7 Nov. 2013, WO2016186953 published 24 Nov. 2016, and WO2016186946 published 24 Nov. 2016.

[0481] The Cas endonuclease can comprise a modified form of the Cas polypeptide. The modified form of the Cas polypeptide can include an amino acid change (e.g., deletion, insertion, chemical alteration, or substitution) that reduces the naturally-occurring nuclease activity of the Cas protein. For example, in some instances, the modified form of the Cas protein has less than 50%, less than 40%, less than 30%, less than 20%, less than 10%, less than 5%, or less than 1% of the nuclease activity of the corresponding wild-type Cas polypeptide (US20140068797 published 6 Mar. 2014). In some cases, the modified form of the Cas polypeptide has no substantial nuclease activity and is referred to as catalytically “inactivated Cas” or “deactivated Cas (dCas).” An inactivated Cas/deactivated Cas includes a deactivated Cas endonuclease (dCas). A catalytically inactive Cas effector protein can be fused to a heterologous sequence to induce or modify activity.

[0482] A Cas endonuclease can be part of a fusion protein comprising one or more heterologous protein domains (e.g., 1, 2, 3, or more domains in addition to the Cas protein). Such a fusion protein may comprise any additional protein sequence, and optionally a linker sequence between any two domains, such as between Cas and a first heterologous domain. Examples of protein domains that may be fused to a Cas protein herein include, without limitation, epitope tags (e.g., histidine [His], V5, FLAG, influenza hemagglutinin [HA], myc, VSV-G, thioredoxin [Trx]), reporters (e.g., glutathione-5-transferase [GST], horseradish peroxidase [HRP], chloramphenicol acetyltransferase [CAT], beta-galactosidase, beta-glucuronidase [GUS], luciferase, green fluorescent protein [GFP], HcRed, DsRed, cyan fluorescent protein [CFP], yellow fluorescent protein [YFP], blue fluorescent protein [BFP]), and domains having one or more of the following activities: methylase activity, demethylase activity, transcription activation activity (e.g., VP16 or VP64), transcription repression activity, transcription release factor activity, histone modification activity, RNA cleavage activity and nucleic acid binding activity. A Cas protein can also be in fusion with a protein that binds DNA molecules or other molecules, such as maltose binding protein (MBP), S-tag, Lex A DNA binding domain (DBD), GAL4A DNA binding domain, and herpes simplex virus (HSV) VP16.

[0483] A catalytically active and/or inactive Cas endonuclease can be fused to a heterologous sequence (US20140068797 published 06 March 2014). Suitable fusion partners include, but are not limited to, a polypeptide that provides an activity that indirectly increases transcription by acting directly on the target DNA or on a polypeptide (e.g., a histone or other DNA-binding protein) associated with the target DNA. Additional suitable fusion partners include, but are not limited to, a polypeptide that provides for methyltransferase activity, demethylase activity, acetyltransferase activity, deacetylase activity, kinase activity, phosphatase activity, ubiquitin ligase activity, deubiquitinating activity, adenylation activity, deadenylation activity, SUMOylating activity, deSUMOylating activity, ribosylation activity, deribosylation activity, myristoylation activity, or demyristoylation activity. Further suitable fusion partners include, but are not limited to, a polypeptide that directly provides for increased transcription of the target nucleic acid (e.g., a transcription activator or a fragment thereof, a protein or fragment thereof that recruits a transcription activator, a small molecule/drug-responsive transcription regulator, etc.).

[0484] The Cas proteins described herein can be expressed and purified by methods known in the art, for example as described in WO/2016/186953 published 24 Nov. 2016.

[0485] A Cas effector protein can comprise a heterologous nuclear localization sequence (NLS). A heterologous NLS amino acid sequence herein may be of sufficient strength to drive accumulation of a Cas protein in a detectable amount in the nucleus of a yeast cell herein, for example. An NLS may comprise one (monopartite) or more (e.g., bipartite) short sequences (e.g., 2 to 20 residues) of basic, positively charged residues (e.g., lysine and/or arginine), and can be located anywhere in a Cas amino acid sequence but such that it is exposed on the protein surface. An NLS may be operably linked to the N-terminus or C-terminus of a Cas protein herein, for example. Two or more NLS sequences can be linked to a Cas protein, for example, such as on both the N- and C-termini of a Cas protein. The Cas endonuclease gene can be operably linked to a SV40 nuclear targeting signal upstream of the Cas codon region and a bipartite VirD2 nuclear localization signal (Tinland et al. (1992) Proc. Natl. Acad. Sci. USA 89:7442-6) downstream of the Cas codon region. Non-limiting examples of suitable NLS sequences herein include those disclosed in U.S. Pat. Nos. 6,660,830 and 7,309,576.

### Guide Polynucleotides

[0486] The guide polynucleotide enables target recognition, binding, and optionally cleavage by the Cas endonuclease, and can be a single molecule or a double molecule. The guide polynucleotide sequence can be a RNA sequence, a DNA sequence, or a combination thereof (a RNA-DNA combination sequence). Optionally, the guide polynucleotide can comprise at least one nucleotide, phosphodiester bond or linkage modification such as, but not limited, to Locked Nucleic Acid (LNA), 5-methyl dC, 2,6-Diaminopurine, 2′-Fluoro A, 2′-Fluoro U, 2′-O-Methyl RNA, phosphorothioate bond, linkage to a cholesterol molecule, linkage to a polyethylene glycol molecule, linkage to a spacer 18 (hexaethylene glycol chain) molecule, or 5′ to 3′ covalent linkage resulting in circularization. A guide polynucleotide that solely comprises ribonucleic acids is also referred to as a “guide RNA” or “gRNA” (US20150082478 published 19 Mar. 2015 and US20150059010 published 26 Feb. 2015). A guide polynucleotide may be engineered or synthetic.

[0487] The guide polynucleotide includes a chimeric non-naturally occurring guide RNA comprising regions that are not found together in nature (i.e., they are heterologous with each other). For example, a chimeric non-naturally occurring guide RNA comprising a first nucleotide sequence domain (referred to as Variable Targeting domain or VT domain) that can hybridize to a nucleotide sequence in a target DNA, linked to a second nucleotide sequence that can recognize the Cas endonuclease, such that the first and second nucleotide sequence are not found linked together in nature.

[0488] In one aspect, the guide polynucleotide is a guide polynucleotide capable of forming a ribonucleoprotein complex, wherein said guide polynucleotide comprises a first nucleotide sequence domain that is complementary to a nucleotide sequence in a target DNA, and a second nucleotide sequence domain that interacts with said Cas endonuclease polypeptide.

[0489] In one aspect, the guide polynucleotide is a guide polynucleotide described herein, wherein the first nucleotide sequence and the second nucleotide sequence domain is selected from the group consisting of a DNA sequence, a RNA sequence, and a combination thereof

[0490] In one aspect, the guide polynucleotide is a guide polynucleotide described herein, wherein the first nucleotide sequence and the second nucleotide sequence domain is selected from the group consisting of RNA backbone modifications that enhance stability, DNA backbone modifications that enhance stability, and a combination thereof (see Kanasty et al., 2013, Common RNA-backbone modifications, Nature Materials 12:976-977; US20150082478 published 19 Mar. 2015 and US20150059010 published 26 Feb. 2015)

[0491] The guide RNA includes a dual molecule comprising a chimeric non-naturally occurring crRNA linked to at least one tracrRNA. A chimeric non-naturally occurring crRNA includes a crRNA that comprises regions that are not found together in nature (i.e., they are heterologous with each other. For example, a crRNA comprising a first nucleotide sequence domain (referred to as Variable Targeting domain or VT domain) that can hybridize to a nucleotide sequence in a target DNA, linked to a second nucleotide sequence (also referred to as a tracr mate sequence) such that the first and second sequence are not found linked together in nature.

[0492] The guide polynucleotide can also be a single molecule (also referred to as single guide polynucleotide) comprising a crNucleotide sequence linked to a tracrNucleotide sequence. The single guide polynucleotide comprises a first nucleotide sequence domain (referred to as Variable Targeting domain or VT domain) that can hybridize to a nucleotide sequence in a target DNA and a Cas endonuclease recognition domain (CER domain), that interacts with a Cas endonuclease polypeptide

[0493] The VT domain and /or the CER domain of a single guide polynucleotide can comprise a RNA sequence, a DNA sequence, or a RNA-DNA-combination sequence. The single guide polynucleotide being comprised of sequences from the crNucleotide and the tracrNucleotide may be referred to as “single guide RNA” (when composed of a contiguous stretch of RNA nucleotides) or “single guide DNA” (when composed of a contiguous stretch of DNA nucleotides) or “single guide RNA-DNA” (when composed of a combination of RNA and DNA nucleotides). The single guide polynucleotide can form a complex with a Cas endonuclease, wherein said guide polynucleotide/Cas endonuclease complex (also referred to as a guide polynucleotide/Cas endonuclease system) can direct the Cas endonuclease to a genomic target site, enabling the Cas endonuclease to recognize, bind to, and optionally nick or cleave (introduce a single or double-strand break) the target site. (US20150082478 published 19 Mar. 2015 and US20150059010 published 26 Feb. 2015).

[0494] A chimeric non-naturally occurring single guide RNA (sgRNA) includes a sgRNA that comprises regions that are not found together in nature (i.e., they are heterologous with each other. For example, a sgRNA comprising a first nucleotide sequence domain (referred to as Variable Targeting domain or VT domain) that can hybridize to a nucleotide sequence in a target DNA linked to a second nucleotide sequence (also referred to as a tracr mate sequence) that are not found linked together in nature.

[0495] The nucleotide sequence linking the crNucleotide and the tracrNucleotide of a single guide polynucleotide can comprise a RNA sequence, a DNA sequence, or a RNA-DNA combination sequence. In one embodiment, the nucleotide sequence linking the crNucleotide and the tracrNucleotide of a single guide polynucleotide (also referred to as “loop”) can be at least 3, 4, 5, 6, 7, 8, 9, 10, 11, 12, 13, 14, 15, 16, 17, 18, 19, 20, 21, 22, 23, 24, 25, 26, 27, 28, 29, 30, 31, 32, 33, 34, 35, 36, 37, 38, 39, 40, 41, 42, 43, 44, 45, 46, 47, 48, 49, 50, 51, 52, 53, 54, 55, 56, 57, 58, 59, 60, 61, 62, 63, 64, 65, 66, 67, 68, 69, 70, 71, 72, 73, 74, 75, 76, 77, 78, 78, 79, 80, 81, 82, 83, 84, 85, 86, 87, 88, 89, 90, 91, 92, 93, 94, 95, 96, 97, 98, 99 or 100 nucleotides in length. In another embodiment, the nucleotide sequence linking the crNucleotide and the tracrNucleotide of a single guide polynucleotide can comprise a tetraloop sequence, such as, but not limiting to a GAAA tetraloop sequence.

[0496] The guide polynucleotide can be produced by any method known in the art, including chemically synthesizing guide polynucleotides (such as but not limiting to Hendel et al. 2015, Nature Biotechnology 33, 985-989), in vitro generated guide polynucleotides, and/or self-splicing guide RNAs (such as but not limited to Xie et al. 2015, PNAS 112:3570-3575).

### Protospacer Adjacent Motif (PAM)

[0497] A “protospacer adjacent motif” (PAM) herein refers to a short nucleotide sequence adjacent to a target sequence (protospacer) that can be recognized (targeted) by a guide polynucleotide/Cas endonuclease system. Many Cas endonucleases require a PAM sequence to successfully recognize a target DNA sequence. The sequence and length of a PAM may differ depending on the Cas protein or Cas protein complex used. The PAM sequence can be of any length but is typically 1, 2, 3, 4, 5, 6, 7, 8, 9, 10, 11, 12, 13, 14, 15, 16, 17, 18, 19 or 20 nucleotides long. Some Cas endonucleases may not require a PAM sequence.

[0498] A “randomized PAM” and “randomized protospacer adjacent motif” are used interchangeably herein, and refer to a random DNA sequence adjacent to a target sequence (protospacer) that is recognized (targeted) by a guide polynucleotide/Cas endonuclease system. The randomized PAM sequence can be of any length but is typically 1, 2, 3, 4, 5, 6, 7, 8, 9, 10, 11, 12, 13, 14, 15, 16, 17, 18, 19 or 20 nucleotides long. A randomized nucleotide includes anyone of the nucleotides A, C, G or T.

### Guide Polynucleotide/Cas Endonuclease Complexes

[0499] A guide polynucleotide/Cascade complex described herein is capable of recognizing, binding to, and optionally nicking, unwinding, or cleaving all or part of a target sequence.

[0500] A guide polynucleotide/Cascade complex that can cleave both strands of a DNA target sequence typically comprises a Cas protein that has all of its endonuclease domains in a functional state (e.g., wild type endonuclease domains or variants thereof retaining some or all activity in each endonuclease domain). Thus, a wild type Cas protein (e.g., a Cas protein disclosed herein), or a variant thereof retaining some or all activity in each endonuclease domain of the Cas protein, is a suitable example of a Cas endonuclease that can cleave both strands of a DNA target sequence.

[0501] A guide polynucleotide/Cascade complex that can cleave one strand of a DNA target sequence can be characterized herein as having nickase activity (e.g., partial cleaving capability). A Cas nickase typically comprises one functional endonuclease domain that allows the Cas to cleave only one strand (i.e., make a nick) of a DNA target sequence. A pair of Cas nickases can be used to increase the specificity of DNA targeting. In general, this can be done by providing two Cas nickases that, by virtue of being associated with RNA components with different guide sequences, target and nick nearby DNA sequences on opposite strands in the region for desired targeting. Such nearby cleavage of each DNA strand creates a double-strand break (i.e., a DSB with single-stranded overhangs), which is then recognized as a substrate for non-homologous-end-joining, NHEJ (prone to imperfect repair leading to mutations) or homologous recombination, HR. Each nick in these embodiments can be at least about 5, between 5 and 10, at least 10, between 10 and 15, at least 15, between 15 and 20, at least 20, between 20 and 30, at least 30, between 30 and 40, at least 40, between 40 and 50, at least 50, between 50 and 60, at least 60, between 60 and 70, at least 70, between 70 and 80, at least 80, between 80 and 90, at least 90, between 90 and 100, or 100 or greater (or any integer between 5 and 100) bases apart from each other, for example. One or two Cas nickase proteins herein can be used in a Cas nickase pair.

[0502] A guide polynucleotide/Cascade complex in certain embodiments can bind to a DNA target site sequence, but does not cleave any strand at the target site sequence. Such a complex may comprise a Cas protein in which all of its nuclease domains are mutant, dysfunctional. A Cas protein herein that binds, but does not cleave, a target DNA sequence can be used to modulate gene expression, for example, in which case the Cas protein could be fused with a transcription factor (or portion thereof) (e.g., a repressor or activator, such as any of those disclosed herein).

[0503] In one aspect, the guide polynucleotide/Cas endonuclease complex described herein is a ribonucleoprotein complex, wherein said Cas endonuclease is covalently or non-covalently linked, or assembled to at least one cascade protein subunit, or functional fragment thereof

[0504] In one embodiment of the disclosure, the guide polynucleotide/Cascade complex is a guide polynucleotide/Cascade complex comprising at least one guide polynucleotide and at least one Cas endonuclease polypeptide, wherein said Cas endonuclease polypeptide comprises at least one protein subunit of a cascade, or a functional fragment thereof, wherein said guide polynucleotide is a chimeric non-naturally occurring guide polynucleotide, wherein said guide polynucleotide/Cas endonuclease complex is capable of recognizing, binding to, and optionally nicking, unwinding, or cleaving all or part of a target sequence.

[0505] The Cas effector protein can be a Cas3 effector protein as disclosed herein.

[0506] In one embodiment of the disclosure, the guide polynucleotide/Cas effector complex is a guide polynucleotide/Cas effector protein complex (PGEN) comprising at least one guide polynucleotide and a Cas3 effector protein, wherein said guide polynucleotide/Cas effector protein complex is capable of recognizing, binding to, and optionally nicking, unwinding, or cleaving all or part of a target sequence.

[0507] The PGEN can be a guide polynucleotide/Cas effector protein complex, wherein said Cas effector protein further comprises one copy or multiple copies of at least one protein subunit, or a functional fragment thereof, of a cascade. In some embodiments, said cascade protein is selected from the group consisting of a Casl protein subunit and, optionally, a Cas2 protein subunit, and any combination thereof. The PGEN can be a guide polynucleotide/Cas effector protein complex, wherein said Cas effector protein further comprises at least Cas1 and, optionally, Cas2.

[0508] In one aspect, the guide polynucleotide/Cas effector protein complex (PGEN) described herein is a PGEN, wherein said Cas effector protein is covalently or non-covalently linked to at least one cascade protein subunit, or functional fragment thereof. The PGEN can be a guide polynucleotide/Cas effector protein complex, wherein said Cas effector protein polypeptide is covalently or non-covalently linked, or assembled to one copy or multiple copies of at least one protein subunit, or a functional fragment thereof, of a Cas1 protein subunit, and optionally Cas2, and any combination thereof, effectively forming a cleavage ready cascade. The PGEN can be a guide polynucleotide/Cas effector protein complex, wherein said Cas effector protein is covalently or non-covalently linked or assembled to Cas1, and optionally Cas2,

[0509] Any component of the guide polynucleotide/Cas effector protein complex, the guide polynucleotide/Cas effector protein complex itself, as well as the polynucleotide modification template(s) and/or donor DNA(s), can be introduced into a heterologous cell or organism by any method known in the art.

### Recombinant Constructs for Transformation of Cells

[0510] The disclosed guide polynucleotides, Cas endonucleases, polynucleotide modification templates, donor DNAs, guide polynucleotide/Cas endonuclease systems disclosed herein, and any one combination thereof, optionally further comprising one or more polynucleotide(s) of interest, can be introduced into a cell. Cells include, but are not limited to, human, non-human, animal, bacterial, fungal, insect, yeast, non-conventional yeast, and plant cells as well as plants and seeds produced by the methods described herein.

[0511] Standard recombinant DNA and molecular cloning techniques used herein are well known in the art and are described more fully in Sambrook et al., Molecular Cloning: A Laboratory Manual; Cold Spring Harbor Laboratory: Cold Spring Harbor, N.Y. (1989). Transformation methods are well known to those skilled in the art and are described infra.

[0512] Vectors and constructs include circular plasmids, and linear polynucleotides, comprising a polynucleotide of interest and optionally other components including linkers, adapters, regulatory or analysis. In some examples a recognition site and/or target site can be comprised within an intron, coding sequence, 5′ UTRs, 3′ UTRs, and/or regulatory regions.

Components for Expression and Utilization of Novel CRISPR-Cas Systems in Prokaryotic and Eukaryotic cells

[0513] The invention further provides expression constructs for expressing in a prokaryotic or eukaryotic cell/organism a guide RNA/Cas system that is capable of recognizing, binding to, and optionally nicking, unwinding, or cleaving all or part of a target sequence.

[0514] In one embodiment, the expression constructs of the disclosure comprise a promoter operably linked to a nucleotide sequence encoding a Cas gene (or plant optimized, including a Cas endonuclease gene described herein) and a promoter operably linked to a guide RNA of the present disclosure. The promoter is capable of driving expression of an operably linked nucleotide sequence in a prokaryotic or eukaryotic cell/organism.

[0515] Nucleotide sequence modification of the guide polynucleotide, VT domain and/or CER domain can be selected from, but not limited to, the group consisting of a 5′ cap, a 3′ polyadenylated tail, a riboswitch sequence, a stability control sequence, a sequence that forms a dsRNA duplex, a modification or sequence that targets the guide poly nucleotide to a subcellular location, a modification or sequence that provides for tracking , a modification or sequence that provides a binding site for proteins , a Locked Nucleic Acid (LNA), a 5-methyl dC nucleotide, a 2,6-Diaminopurine nucleotide, a 2′-Fluoro A nucleotide, a 2′-Fluoro U nucleotide; a 2′-O-Methyl RNA nucleotide, a phosphorothioate bond, linkage to a cholesterol molecule, linkage to a polyethylene glycol molecule, linkage to a spacer 18 molecule, a 5′ to 3′ covalent linkage, or any combination thereof. These modifications can result in at least one additional beneficial feature, wherein the additional beneficial feature is selected from the group of a modified or regulated stability, a subcellular targeting, tracking, a fluorescent label, a binding site for a protein or protein complex, modified binding affinity to complementary target sequence, modified resistance to cellular degradation, and increased cellular permeability.

[0516] A method of expressing RNA components such as gRNA in eukaryotic cells for performing Cas9-mediated DNA targeting has been to use RNA polymerase III (Pol III) promoters, which allow for transcription of RNA with precisely defined, unmodified, 5′- and 3′-ends (DiCarlo et al., Nucleic Acids Res. 41: 4336-4343; Ma et al., Mol. Ther. Nucleic Acids 3:e161). This strategy has been successfully applied in cells of several different species including maize and soybean (US20150082478 published 19 Mar. 2015). Methods for expressing RNA components that do not have a 5′ cap have been described (WO2016/025131 published 18 Feb. 2016).

[0517] Various methods and compositions can be employed to obtain a cell or organism having a polynucleotide of interest inserted in a target site for a Cas endonuclease. Such methods can employ homologous recombination (HR) to provide integration of the polynucleotide of interest at the target site. In one method described herein, a polynucleotide of interest is introduced into the organism cell via a donor DNA construct.

[0518] The donor DNA construct further comprises a first and a second region of homology that flank the polynucleotide of interest. The first and second regions of homology of the donor DNA share homology to a first and a second genomic region, respectively, present in or flanking the target site of the cell or organism genome.

[0519] The donor DNA can be tethered to the guide polynucleotide. Tethered donor DNAs can allow for co-localizing target and donor DNA, useful in genome editing, gene insertion, and targeted genome regulation, and can also be useful in targeting post-mitotic cells where function of endogenous HR machinery is expected to be highly diminished (Mali et al., 2013, Nature Methods Vol. 10: 957-963).

[0520] The amount of homology or sequence identity shared by a target and a donor polynucleotide can vary and includes total lengths and/or regions having unit integral values in the ranges of about 1-20 bp, 20-50 bp, 50-100 bp, 75-150 bp, 100-250 bp, 150-300 bp, 200-400 bp, 250-500 bp, 300-600 bp, 350-750 bp, 400-800 bp, 450-900 bp, 500-1000 bp, 600-1250 bp, 700-1500 bp, 800-1750 bp, 900-2000 bp, 1-2.5 kb, 1.5-3 kb, 2-4 kb, 2.5-5 kb, 3-6 kb, 3.5-7 kb, 4-8 kb, 5-10 kb, or up to and including the total length of the target site. These ranges include every integer within the range, for example, the range of 1-20 bp includes 1, 2, 3, 4, 5, 6, 7, 8, 9, 10, 11, 12, 13, 14, 15, 16, 17, 18, 19 and 20 bps. The amount of homology can also be described by percent sequence identity over the full aligned length of the two polynucleotides which includes percent sequence identity at least of about 50%, 55%, 60%, 65%, 70%, 71%, 72%, 73%, 74%, 75%, 76%, 77%, 78%, 79%, 80%, 81%, 82%, 83%, 84%, 85%, 86%, 87%, 88%, 89%, 90%, 91%, 92%, 93%, 94%, 95%, 96%, 97%, 98%, between 98% and 99%, 99%, between 99% and 100%, or 100%. Sufficient homology includes any combination of polynucleotide length, global percent sequence identity, and optionally conserved regions of contiguous nucleotides or local percent sequence identity, for example sufficient homology can be described as a region of 75-150 bp having at least 80% sequence identity to a region of the target locus. Sufficient homology can also be described by the predicted ability of two polynucleotides to specifically hybridize under high stringency conditions, see, for example, Sambrook et al., (1989) Molecular Cloning: A Laboratory Manual, (Cold Spring Harbor Laboratory Press, NY); Current Protocols in Molecular Biology, Ausubel et al., Eds (1994) Current Protocols, (Greene Publishing Associates, Inc. and John Wiley & Sons, Inc.); and, Tijssen (1993) Laboratory Techniques in Biochemistry and Molecular Biology—Hybridization with Nucleic Acid Probes, (Elsevier, N.Y.).

[0521] The structural similarity between a given genomic region and the corresponding region of homology found on the donor DNA can be any degree of sequence identity that allows for homologous recombination to occur. For example, the amount of homology or sequence identity shared by the “region of homology” of the donor DNA and the “genomic region” of the organism genome can be at least 50%, 55%, 60%, 65%, 70%, 75%, 80%, 81%, 82%, 83%, 84%, 85%, 86%, 87%, 88%, 89%, 90%, 91%, 92%, 93%, 94%, 95%, 96%, 97%, 98%, 99% or 100% sequence identity, such that the sequences undergo homologous recombination

[0522] The region of homology on the donor DNA can have homology to any sequence flanking the target site. While in some instances the regions of homology share significant sequence homology to the genomic sequence immediately flanking the target site, it is recognized that the regions of homology can be designed to have sufficient homology to regions that may be further 5′ or 3′ to the target site. The regions of homology can also have homology with a fragment of the target site along with downstream genomic regions

[0523] In one embodiment, the first region of homology further comprises a first fragment of the target site and the second region of homology comprises a second fragment of the target site, wherein the first and second fragments are dissimilar.

### Polynucleotides of Interest

[0524] General categories of polynucleotides of interest include those that confer a trait of interest or importance to the cell comprising the polynucleotide, an organism comprising the polynucleotide, or to a progeny of the cell or organism. In some embodiments, the polynucleotide conferring the trait or characteristic of interest is inherited by the progeny of the cell or organism. In some embodiments, the polynucleotide itself is not transferred to the progeny but the characteristic that it imparts is (e.g., a genomic modification effected by the polynucleotide is retained).

[0525] Polynucleotides of interest include, for example but not limited to, markers, genes of interest involved in information or genomic modification (such as zinc fingers or cas endonucleases), those involved in communication (such as kinases), and those involved in housekeeping (such as heat shock proteins).

[0526] Other traits of interest or importance include phenotypes that enable selection (markers). In some aspects, the trait of interest or importance includes those that provide an improvement in a cellular or organism characteristic, for example but not limited to: selectable marker resistance, disease resistance, drought tolerance, heat tolerance, cold tolerance, salinity tolerance, metal tolerance, herbicide tolerance, improved water use efficiency, improved nitrogen utilization, improved nitrogen fixation, pest resistance, herbivore resistance, pathogen resistance, yield improvement, health enhancement, vigor improvement, growth improvement, photosynthetic capability improvement, nutrition enhancement, altered protein composition, altered oil composition, increased biomass, increased shoot length, increased root length, improved root architecture, modulation of a metabolite, modulation of the proteome, increased seed weight, altered seed carbohydrate composition, altered seed oil composition, altered seed protein composition, altered seed nutrient composition, improved fertility, improved fecundity, improved environmental tolerance, improved vigor, improved disease resistance, improved disease tolerance, improved tolerance to a heterologous molecule, improved fitness, improved physical characteristic, greater mass, increased production of a biochemical molecule, decreased production of a biochemical molecule, upregulation of a gene, downregulation of a gene, upregulation of a biochemical pathway, downregulation of a biochemical pathway, stimulation of cell reproduction, and suppression of cell reproduction.

[0527] Polynucleotides of interest are further described herein and include polynucleotides reflective of the commercial markets and interests of those involved in the development of the crop. Crops and markets of interest change, and as developing nations open up world markets, new crops and technologies will emerge also. In addition, as our understanding of agronomic traits and characteristics such as yield and heterosis increase, the choice of genes for genetic engineering will change accordingly.

[0528] Polynucleotides of agronomic interest also include, but are not limited to, genes involved in traits of agronomic interest (a.k.a. “traits of agronomic importance”) such as but not limited to: crop yield, grain quality, crop nutrient content, starch and carbohydrate quality and quantity as well as those affecting kernel size, sucrose loading, protein quality and quantity, nitrogen fixation and/or utilization, fatty acid and oil composition, genes encoding proteins conferring resistance to abiotic stress (such as drought, nitrogen, temperature, salinity, toxic metals or trace elements, or those conferring resistance to toxins such as pesticides and herbicides), genes encoding proteins conferring resistance to biotic stress (such as attacks by fungi, viruses, bacteria, insects, and nematodes, and development of diseases associated with these organisms).

[0529] Agronomically important traits such as oil, starch, and protein content can be genetically altered in addition to using traditional breeding methods. Modifications include increasing content of oleic acid, saturated and unsaturated oils, increasing levels of lysine and sulfur, providing essential amino acids, and also modification of starch. Hordothionin protein modifications are described in U.S. Pat. Nos. 5,703,049, 5,885,801, 5,885,802, and 5,990,389.

[0530] Polynucleotide sequences of interest may encode proteins involved in providing disease or pest resistance. By “disease resistance” or “pest resistance” is intended that the plants avoid the harmful symptoms that are the outcome of the plant-pathogen interactions. Pest resistance genes may encode resistance to pests that have great yield drag such as rootworm, cutworm, European Corn Borer, and the like. Disease resistance and insect resistance genes such as lysozymes or cecropins for antibacterial protection, or proteins such as defensins, glucanases or chitinases for antifungal protection, or Bacillus thuringiensis endotoxins, protease inhibitors, collagenases, lectins, or glycosidases for controlling nematodes or insects are all examples of useful gene products. Genes encoding disease resistance traits include detoxification genes, such as against fumonisin (U.S. Pat. No. 5,792,931); avirulence (avr) and disease resistance (R) genes (Jones et al. (1994) Science 266:789; Martin et al. (1993) Science 262:1432; and Mindrinos et al. (1994) Cell 78:1089); and the like. Insect resistance genes may encode resistance to pests that have great yield drag such as rootworm, cutworm, European Corn Borer, and the like. Such genes include, for example, Bacillus thuringiensis toxic protein genes (U.S. Pat. Nos. 5,366,892; 5,747,450; 5,736,514; 5,723,756; 5,593,881; and Geiser et al. (1986) Gene 48:109); and the like.

[0531] An “herbicide resistance protein” or a protein resulting from expression of an “herbicide resistance-encoding nucleic acid molecule” includes proteins that confer upon a cell the ability to tolerate a higher concentration of an herbicide than cells that do not express the protein, or to tolerate a certain concentration of an herbicide for a longer period of time than cells that do not express the protein. Herbicide resistance traits may be introduced into plants by genes coding for resistance to herbicides that act to inhibit the action of acetolactate synthase (ALS, also referred to as acetohydroxyacid synthase, AHAS), in particular the sulfonylurea (UK: sulphonylurea) type herbicides, genes coding for resistance to herbicides that act to inhibit the action of glutamine synthase, such as phosphinothricin or basta (e.g., the bar gene), glyphosate (e.g., the EPSP synthase gene and the GAT gene), HPPD inhibitors (e.g, the HPPD gene) or other such genes known in the art. See, for example, U.S. Pat. Nos. 7,626,077, 5,310,667, 5,866,775, 6,225,114, 6,248,876, 7,169,970, 6,867,293, and 9,187,762.

[0532] Furthermore, it is recognized that the polynucleotide of interest may also comprise anti sense sequences complementary to at least a portion of the messenger RNA (mRNA) for a targeted gene sequence of interest. Antisense nucleotides are constructed to hybridize with the corresponding mRNA. Modifications of the antisense sequences may be made as long as the sequences hybridize to and interfere with expression of the corresponding mRNA. In this manner, antisense constructions having 70%, 80%, or 85% sequence identity to the corresponding antisense sequences may be used. Furthermore, portions of the antisense nucleotides may be used to disrupt the expression of the target gene. Generally, sequences of at least 50 nucleotides, 100 nucleotides, 200 nucleotides, or greater may be used.

[0533] In addition, the polynucleotide of interest may also be used in the sense orientation to suppress the expression of endogenous genes in plants. Methods for suppressing gene expression in plants using polynucleotides in the sense orientation are known in the art. The methods generally involve transforming plants with a DNA construct comprising a promoter that drives expression in a plant operably linked to at least a portion of a nucleotide sequence that corresponds to the transcript of the endogenous gene. Typically, such a nucleotide sequence has substantial sequence identity to the sequence of the transcript of the endogenous gene, generally greater than about 65% sequence identity, about 85% sequence identity, or greater than about 95% sequence identity. See U.S. Pat. Nos. 5,283,184 and 5,034,323.

[0534] The polynucleotide of interest can also be a phenotypic marker. A phenotypic marker is screenable or a selectable marker that includes visual markers and selectable markers whether it is a positive or negative selectable marker. Any phenotypic marker can be used. Specifically, a selectable or screenable marker comprises a DNA segment that allows one to identify, or select for or against a molecule or a cell that comprises it, often under particular conditions. These markers can encode an activity, such as, but not limited to, production of RNA, peptide, or protein, or can provide a binding site for RNA, peptides, proteins, inorganic and organic compounds or compositions and the like.

[0535] Examples of selectable markers include, but are not limited to, DNA segments that comprise restriction enzyme sites; DNA segments that encode products which provide resistance against otherwise toxic compounds including antibiotics, such as, spectinomycin, ampicillin, kanamycin, tetracycline, Basta, neomycin phosphotransferase II (NEO) and hygromycin phosphotransferase (HPT)); DNA segments that encode products which are otherwise lacking in the recipient cell (e.g., tRNA genes, auxotrophic markers); DNA segments that encode products which can be readily identified (e.g., phenotypic markers such as β-galactosidase, GUS; fluorescent proteins such as green fluorescent protein (GFP), cyan (CFP), yellow (YFP), red (RFP), and cell surface proteins); the generation of new primer sites for PCR (e.g., the juxtaposition of two DNA sequence not previously juxtaposed), the inclusion of DNA sequences not acted upon or acted upon by a restriction endonuclease or other DNA modifying enzyme, chemical, etc.; and, the inclusion of a DNA sequences required for a specific modification (e.g., methylation) that allows its identification.

[0536] Additional selectable markers include genes that confer resistance to herbicidal compounds, such as sulphonylureas, glufosinate ammonium, bromoxynil, imidazolinones, and 2,4-dichlorophenoxyacetate (2,4-D). See for example, Acetolactase synthase (ALS) for resistance to sulfonylureas, imidazolinones, triazolopyrimidine sulfonamides, pyrimidinylsalicylates and sulphonylaminocarbonyl-triazolinones (Shaner and Singh, 1997, Herbicide Activity: Toxicol Biochem Mol Biol 69-110); glyphosate resistant 5-enolpyruvylshikimate-3-phosphate (EPSPS) (Saroha et al. 1998, J. Plant Biochemistry & Biotechnology Vol 7:65-72);

[0537] Polynucleotides of interest includes genes that can be stacked or used in combination with other traits, such as but not limited to herbicide resistance or any other trait described herein. Polynucleotides of interest and/or traits can be stacked together in a complex trait locus as described in US20130263324 published 3 Oct. 2013 and in WO/2013/112686, published 1 Aug. 2013.

[0538] A polypeptide of interest includes any protein or polypeptide that is encoded by a polynucleotide of interest described herein.

[0539] Further provided are methods for identifying at least one plant cell, comprising in its genome, a polynucleotide of interest integrated at the target site. A variety of methods are available for identifying those plant cells with insertion into the genome at or near to the target site. Such methods can be viewed as directly analyzing a target sequence to detect any change in the target sequence, including but not limited to PCR methods, sequencing methods, nuclease digestion, Southern blots, and any combination thereof. See, for example, US20090133152 published 21 May 2009. The method also comprises recovering a plant from the plant cell comprising a polynucleotide of interest integrated into its genome. The plant may be sterile or fertile. It is recognized that any polynucleotide of interest can be provided, integrated into the plant genome at the target site, and expressed in a plant.

### Optimization of Sequences for Expression in Plants

[0540] Methods are available in the art for synthesizing plant-preferred genes. See, for example, U.S. Pat. Nos. 5,380,831, and 5,436,391, and Murray et al. (1989) Nucleic Acids Res. 17:477-498. Additional sequence modifications are known to enhance gene expression in a plant host. These include, for example, elimination of: one or more sequences encoding spurious polyadenylation signals, one or more exon-intron splice site signals, one or more transposon-like repeats, and other such well-characterized sequences that may be deleterious to gene expression. The G-C content of the sequence may be adjusted to levels average for a given plant host, as calculated by reference to known genes expressed in the host plant cell. When possible, the sequence is modified to avoid one or more predicted hairpin secondary mRNA structures. Thus, “a plant-optimized nucleotide sequence” of the present disclosure comprises one or more of such sequence modifications.

### Expression Elements

[0541] Any polynucleotide encoding a Cas protein or other CRISPR system component disclosed herein may be functionally linked to a heterologous expression element, to facilitate transcription or regulation in a host cell. Such expression elements include but are not limited to: promoter, leader, intron, and terminator. Expression elements may be “minimal”—meaning a shorter sequence derived from a native source, that still functions as an expression regulator or modifier. Alternatively, an expression element may be “optimized”—meaning that its polynucleotide sequence has been altered from its native state in order to function with a more desirable characteristic in a particular host cell (for example, but not limited to, a bacterial promoter may be “ ” to improve its expression in corn plants). Alternatively, an expression element may be “synthetic”—meaning that it is designed in silico and synthesized for use in a host cell. Synthetic expression elements may be entirely synthetic, or partially synthetic (comprising a fragment of a naturally-occurring polynucleotide sequence).

[0542] It has been shown that certain promoters are able to direct RNA synthesis at a higher rate than others. These are called “strong promoters”. Certain other promoters have been shown to direct RNA synthesis at higher levels only in particular types of cells or tissues and are often referred to as “tissue specific promoters”, or “tissue-preferred promoters” if the promoters direct RNA synthesis preferably in certain tissues but also in other tissues at reduced levels.

[0543] A plant promoter includes a promoter capable of initiating transcription in a plant cell. For a review of plant promoters, see, Potenza et al., 2004, In vitro Cell Dev Biol 40:1-22; Porto et al., 2014, Molecular Biotechnology (2014), 56(1), 38-49.

[0544] New promoters of various types useful in plant cells are constantly being discovered; numerous examples may be found in the compilation by Okamuro and Goldberg, (1989) In The Biochemistry of Plants, Vol. 115, Stumpf and Conn, eds (New York, N.Y.: Academic Press), pp. 1-82.

Modification of Genomes with Novel CRISPR-Cas System Components

[0545] As described herein, a guided Cascade can recognize, bind to a DNA target sequence and introduce a single strand (nick) or double-strand break. Once a single or double-strand break is induced in the DNA, the cell's DNA repair mechanism is activated to repair the break. Error-prone DNA repair mechanisms can produce mutations at double-strand break sites.

[0546] The most common repair mechanism to bring the broken ends together is the nonhomologous end-joining (NHEJ) pathway (Bleuyard et al., (2006) DNA Repair 5:1-12). The structural integrity of chromosomes is typically preserved by the repair, but deletions, insertions, or other rearrangements (such as chromosomal translocations) are possible (Siebert and Puchta, 2002, Plant Cell 14:1121-31; Pacher et al., 2007, Genetics 175:21-9). Other pathways such as MMEJ and alt-NHEJ are also contemplated.

[0547] Homology-directed repair (HDR) is a mechanism in cells to repair double-stranded and single stranded DNA breaks. Homology-directed repair includes homologous recombination (HR) and single-strand annealing (SSA) (Lieber. 2010 Annu. Rev. Biochem. 79:181-211). The most common form of HDR is called homologous recombination (HR), which has the longest sequence homology requirements between the donor and acceptor DNA. Other forms of HDR include single-stranded annealing (SSA) and breakage-induced replication, and these require shorter sequence homology relative to HR. Homology-directed repair at nicks (single-stranded breaks) can occur via a mechanism distinct from HDR at double-strand breaks (Davis and Maizels. PNAS (0027-8424), 111 (10), p. E924-E932).

### Gene Targeting

[0548] The guide polynucleotide/Cas systems described herein can be used for gene targeting.

[0549] In general, DNA targeting can be performed by cleaving one or both strands at a specific polynucleotide sequence in a cell with a Cas protein associated with a suitable polynucleotide component. Once a single or double-strand break is induced in the DNA, the cell's DNA repair mechanism is activated to repair the break via nonhomologous end-joining (NHEJ) or Homology-Directed Repair (HDR) processes which can lead to modifications at the target site.

[0550] The length of the DNA sequence at the target site can vary, and includes, for example, target sites that are at least 12, 13, 14, 15, 16, 17, 18, 19, 20, 21, 22, 23, 24, 25, 26, 27, 28, 29, 30, or more than 30 nucleotides in length. It is further possible that the target site can be palindromic, that is, the sequence on one strand reads the same in the opposite direction on the complementary strand. The nick/cleavage site can be within the target sequence or the nick/cleavage site could be outside of the target sequence. In another variation, the cleavage could occur at nucleotide positions immediately opposite each other to produce a blunt end cut or, in other cases, the incisions could be staggered to produce single-stranded overhangs, also called “sticky ends”, which can be either 5′ overhangs, or 3′ overhangs. Active variants of genomic target sites can also be used. Such active variants can comprise at least 65%, 70%, 75%, 80%, 85%, 90%, 91%, 92%, 93%, 94%, 95%, 96%, 97%, 98%, 99% or more sequence identity to the given target site, wherein the active variants retain biological activity and hence are capable of being recognized and cleaved by an Cas endonuclease.

[0551] Assays to measure the single or double-strand break of a target site by an endonuclease are known in the art and generally measure the overall activity and specificity of the agent on DNA substrates comprising recognition sites.

[0552] A targeting method herein can be performed in such a way that two or more DNA target sites are targeted in the method, for example. Such a method can optionally be characterized as a multiplex method. Two, three, four, five, six, seven, eight, nine, ten, or more target sites can be targeted at the same time in certain embodiments. A multiplex method is typically performed by a targeting method herein in which multiple different RNA components are provided, each designed to guide a guide polynucleotide/Cas endonuclease complex to a unique DNA target site.

### Gene Editing

[0553] The process for editing a genomic sequence combining DSB and modification templates generally comprises: introducing into a host cell a DSB-inducing agent, or a nucleic acid encoding a DSB-inducing agent, that recognizes a target sequence in the chromosomal sequence and is able to induce a DSB in the genomic sequence, and at least one polynucleotide modification template comprising at least one nucleotide alteration when compared to the nucleotide sequence to be edited. The polynucleotide modification template can further comprise nucleotide sequences flanking the at least one nucleotide alteration, in which the flanking sequences are substantially homologous to the chromosomal region flanking the DSB. Genome editing using DSB-inducing agents, such as Cas-gRNA complexes, has been described, for example in US20150082478 published on 19 Mar. 2015, WO2015026886 published on 26 Feb. 2015, WO2016007347 published 14 Jan. 2016, and WO/2016/025131 published on 18 Feb. 2016.

[0554] Some uses for guide RNA/Cas endonuclease systems have been described (see for example: US20150082478 A1 published 19 Mar. 2015, WO2015026886 published 26 Feb. 2015, and US20150059010 published 26 Feb. 2015) and include but are not limited to modifying or replacing nucleotide sequences of interest (such as a regulatory elements), insertion of polynucleotides of interest, gene knock-out, gene-knock in, modification of splicing sites and/or introducing alternate splicing sites, modifications of nucleotide sequences encoding a protein of interest, chemical alterations of a nucleotide such as by the addition or deletion or substitution of one or more atoms, amino acid and/or protein fusions, and gene silencing by expressing an inverted repeat into a gene of interest.

[0555] Proteins may be altered in various ways including amino acid substitutions, deletions, truncations, insertions, and chemical alterations of one or more amino acids such as by the addition or deletion or substitution of one or more atoms. Methods for such manipulations are generally known. For example, amino acid sequence variants of the protein(s) can be prepared by mutations in the DNA. Methods for mutagenesis and nucleotide sequence alterations include, for example, Kunkel, (1985) Proc. Natl. Acad. Sci. USA 82:488-92; Kunkel et al., (1987) Meth Enzymol 154:367-82; U.S. Pat. No. 4,873,192; Walker and Gaastra, eds. (1983) Techniques in Molecular Biology (MacMillan Publishing Company, New York) and the references cited therein. Guidance regarding amino acid substitutions not likely to affect biological activity of the protein is found, for example, in the model of Dayhoff et al., (1978) Atlas of Protein Sequence and Structure (Natl Biomed Res Found, Washington, D.C.). Conservative substitutions, such as exchanging one amino acid with another having similar properties, may be preferable. Conservative deletions, insertions, and amino acid substitutions are not expected to produce radical changes in the characteristics of the protein, and the effect of any substitution, deletion, insertion, or combination thereof can be evaluated by routine screening assays. Assays for double-strand-break-inducing activity are known and generally measure the overall activity and specificity of the agent on DNA substrates comprising target sites.

[0556] Described herein are methods for genome editing with Cleavage Ready cascade (crCascade) Complexes. Following characterization of the guide RNA and PAM sequence, components of the cleavage ready cascade (crCascade) complex and associated CRISPR RNA (crRNA) may be utilized to modify chromosomal DNA in other organisms including plants. To facilitate optimal expression and nuclear localization (for eukaryotic cells), the genes comprising the crCascade may be optimized as described in W02016186953 published 24 November 2016, and then delivered into cells as DNA expression cassettes by methods known in the art. The components necessary to comprise an active crCascade complex may also be delivered as RNA with or without modifications that protect the RNA from degradation or as mRNA capped or uncapped (Zhang, Y. et al., 2016, Nat. Commun. 7:12617) or Cas protein guide polynucleotide complexes (WO2017070032 published 27 Apr. 2017), or any combination thereof. Additionally, a part or part(s) of the crCascade complex and crRNA may be expressed from a DNA construct while other components are delivered as RNA with or without modifications that protect the RNA from degradation or as mRNA capped or uncapped (Zhang et al. 2016 Nat. Commun. 7:12617) or Cas protein guide polynucleotide complexes (WO2017070032 published 27 April 2017) or any combination thereof. To produce crRNAs in-vivo, tRNA derived elements may also be used to recruit endogenous RNAses to cleave crRNA transcripts into mature forms capable of guiding the crCascade complex to its DNA target site, as described, for example, in WO2017105991 published 22 Jun. 2017. crCascade nickase complexes may be utilized separately or concertedly to generate a single or multiple DNA nicks on one or both DNA strands. Furthermore, the cleavage activity of the Cas endonuclease may be deactivated by altering key catalytic residues in its cleavage domain (Sinkunas, T. et al., 2013, EMBO J. 32:385-394) resulting in a RNA guided helicase that may be used to enhance homology directed repair, induce transcriptional activation, or remodel local DNA structures. Moreover, the activity of the Cas cleavage and helicase domains may both be knocked-out and used in combination with other DNA cutting, DNA nicking, DNA binding, transcriptional activation, transcriptional repression, DNA remodeling, DNA deamination, DNA unwinding, DNA recombination enhancing, DNA integration, DNA inversion, and DNA repair agents.

[0557] The transcriptional direction of the tracrRNA for the CRISPR-Cas system (if present) and other components of the CRISPR-Cas system (such as variable targeting domain, crRNA repeat, loop, anti-repeat) can be deduced as described in WO2016186946 published 24 Nov. 2016, and WO2016186953 published 24 Nov. 2016.

[0558] As described herein, once the appropriate guide RNA requirement is established, the PAM preferences for each new system disclosed herein may be examined. If the cleavage ready cascade (crCascade) complex results in degradation of the randomized PAM library, the crCascade complex can be converted into a nickase by disabling the ATPase dependent helicase activity either through mutagenesis of critical residues or by assembling the reaction in the absence of ATP as described previously (Sinkunas, T. et al., 2013, EMBO J. 32:385-394). Two regions of PAM randomization separated by two protospacer targets may be utilized to generate a double-stranded DNA break which may be captured and sequenced to examine the PAM sequences that support cleavage by the respective crCascade complex.

[0559] In one embodiment, the invention describes a method for modifying a target site in the genome of a cell, the method comprising introducing into a cell at least one PGEN described herein, and identifying at least one cell that has a modification at said target, wherein the modification at said target site is selected from the group consisting of (i) a replacement of at least one nucleotide, (ii) a deletion of at least one nucleotide, (iii) an insertion of at least one nucleotide, and (iv) any combination of (i)-(iii).

[0560] The nucleotide to be edited can be located within or outside a target site recognized and cleaved by a Cas endonuclease. In one embodiment, the at least one nucleotide modification is not a modification at a target site recognized and cleaved by a Cas endonuclease. In another embodiment, there are at least 1, 2, 3, 4, 5, 6, 7, 8, 9, 10, 11, 12, 13, 14, 15, 16, 17, 18, 19, 20, 21, 22, 23, 24, 25, 26, 27, 30, 40, 50, 100, 200, 300, 400, 500, 600, 700, 900 or 1000 nucleotides between the at least one nucleotide to be edited and the genomic target site.

[0561] A knock-out may be produced by an indel (insertion or deletion of nucleotide bases in a target DNA sequence through NHEJ), or by specific removal of sequence that reduces or completely destroys the function of sequence at or near the targeting site.

[0562] A guide polynucleotide/Cas endonuclease induced targeted mutation can occur in a nucleotide sequence that is located within or outside a genomic target site that is recognized and cleaved by the Cas endonuclease.

[0563] The method for editing a nucleotide sequence in the genome of a cell can be a method without the use of an exogenous selectable marker by restoring function to a non-functional gene product.

[0564] In one embodiment, the invention describes a method for modifying a target site in the genome of a cell, the method comprising introducing into a cell at least one PGEN described herein and at least one donor DNA, wherein said donor DNA comprises a polynucleotide of interest, and optionally, further comprising identifying at least one cell that said polynucleotide of interest integrated in or near said target site.

[0565] In one aspect, the methods disclosed herein may employ homologous recombination (HR) to provide integration of the polynucleotide of interest at the target site.

[0566] Various methods and compositions can be employed to produce a cell or organism having a polynucleotide of interest inserted in a target site via activity of a CRISPR-Cas system component described herein. In one method described herein, a polynucleotide of interest is introduced into the organism cell via a donor DNA construct. As used herein, “donor DNA” is a DNA construct that comprises a polynucleotide of interest to be inserted into the target site of a Cas endonuclease. The donor DNA construct further comprises a first and a second region of homology that flank the polynucleotide of interest. The first and second regions of homology of the donor DNA share homology to a first and a second genomic region, respectively, present in or flanking the target site of the cell or organism genome.

[0567] The donor DNA can be tethered to the guide polynucleotide. Tethered donor DNAs can allow for co-localizing target and donor DNA, useful in genome editing, gene insertion, and targeted genome regulation, and can also be useful in targeting post-mitotic cells where function of endogenous HR machinery is expected to be highly diminished (Mali et al., 2013, Nature Methods Vol. 10: 957-963).

[0568] The amount of homology or sequence identity shared by a target and a donor polynucleotide can vary and includes total lengths and/or regions having unit integral values in the ranges of about 1-20 bp, 20-50 bp, 50-100 bp, 75-150 bp, 100-250 bp, 150-300 bp, 200-400 bp, 250-500 bp, 300-600 bp, 350-750 bp, 400-800 bp, 450-900 bp, 500-1000 bp, 600-1250 bp, 700-1500 bp, 800-1750 bp, 900-2000 bp, 1-2.5 kb, 1.5-3 kb, 2-4 kb, 2.5-5 kb, 3-6 kb, 3.5-7 kb, 4-8 kb, 5-10 kb, or up to and including the total length of the target site. These ranges include every integer within the range, for example, the range of 1-20 bp includes 1, 2, 3, 4, 5, 6, 7, 8, 9, 10, 11, 12, 13, 14, 15, 16, 17, 18, 19 and 20 bps. The amount of homology can also be described by percent sequence identity over the full aligned length of the two polynucleotides which includes percent sequence identity of about at least 50%, 55%, 60%, 65%, 70%, 71%, 72%, 73%, 74%, 75%, 76%, 77%, 78%, 79%, 80%, 81%, 82%, 83%, 84%, 85%, 86%, 87%, 88%, 89%, 90%, 91%, 92%, 93%, 94%, 95%, 96%, 97%, 98%, 99% or 100%. Sufficient homology includes any combination of polynucleotide length, global percent sequence identity, and optionally conserved regions of contiguous nucleotides or local percent sequence identity, for example sufficient homology can be described as a region of 75-150 bp having at least 80% sequence identity to a region of the target locus. Sufficient homology can also be described by the predicted ability of two polynucleotides to specifically hybridize under high stringency conditions, see, for example, Sambrook et al., (1989) Molecular Cloning: A Laboratory Manual, (Cold Spring Harbor Laboratory Press, NY); Current Protocols in Molecular Biology, Ausubel et al., Eds (1994) Current Protocols, (Greene Publishing Associates, Inc. and John Wiley & Sons, Inc.); and, Tijssen (1993) Laboratory Techniques in Biochemistry and Molecular Biology—Hybridization with Nucleic Acid Probes, (Elsevier, N.Y.).

[0569] Episomal DNA molecules can also be ligated into the double-strand break, for example, integration of T-DNAs into chromosomal double-strand breaks (Chilton and Que, (2003) Plant Physiol 133:956-65; Salomon and Puchta, (1998) EMBO J. 17:6086-95). Once the sequence around the double-strand breaks is altered, for example, by exonuclease activities involved in the maturation of double-strand breaks, gene conversion pathways can restore the original structure if a homologous sequence is available, such as a homologous chromosome in non-dividing somatic cells, or a sister chromatid after DNA replication (Molinier et al., (2004) Plant Cell 16:342-52). Ectopic and/or epigenic DNA sequences may also serve as a DNA repair template for homologous recombination (Puchta, (1999) Genetics 152:1173-81).

[0570] In one embodiment, the disclosure comprises a method for editing a nucleotide sequence in the genome of a cell, the method comprising introducing into at least one PGEN described herein, and a polynucleotide modification template, wherein said polynucleotide modification template comprises at least one nucleotide modification of said nucleotide sequence, and optionally further comprising selecting at least one cell that comprises the edited nucleotide sequence.

[0571] The guide polynucleotide/Cas endonuclease system can be used in combination with at least one polynucleotide modification template to allow for editing (modification) of a genomic nucleotide sequence of interest. (See also US20150082478, published 19 Mar. 2015 and WO2015026886 published 26 Feb. 2015).

[0572] Polynucleotides of interest and/or traits can be stacked together in a complex trait locus as described in WO2012129373 published 27 Sep. 2012, and in WO2013112686, published 1 Aug. 2013. The guide polynucleotide/endonuclease system described herein provides for an efficient system to generate double-strand breaks and allows for traits to be stacked in a complex trait locus.

[0573] A guide polynucleotide/Cas system as described herein, mediating gene targeting, can be used in methods for directing heterologous gene insertion and/or for producing complex trait loci comprising multiple heterologous genes in a fashion similar as disclosed in WO2012129373 published 27 Sep. 2012, where instead of using a double-strand break inducing agent to introduce a gene of interest, a guide polynucleotide/Cas system as disclosed herein is used. By inserting independent transgenes within 0.1, 0.2, 0.3, 0.4, 0.5, 1.0, 2, or even 5 centimorgans (cM) from each other, the transgenes can be bred as a single genetic locus (see, for example, US20130263324 published 3 Oct. 2013 or WO2012129373 published 14 Mar. 2013). After selecting a plant comprising a transgene, plants comprising (at least) one transgenes can be crossed to form an F1 that comprises both transgenes. In progeny from these F1 (F2 or BC1) 1/500 progeny would have the two different transgenes recombined onto the same chromosome. The complex locus can then be bred as single genetic locus with both transgene traits. This process can be repeated to stack as many traits as desired.

[0574] Further uses for guide RNA/Cas endonuclease systems have been described (See for example: US20150082478 published 19 Mar. 2015, WO2015026886 published 26 Feb. 2015, US20150059010 published 26 Feb. 2015, WO2016007347 published 14 Jan. 2016, and PCT application WO2016025131 published 18 Feb. 2016) and include but are not limited to modifying or replacing nucleotide sequences of interest (such as a regulatory elements), insertion of polynucleotides of interest, gene knock-out, gene-knock in, modification of splicing sites and/or introducing alternate splicing sites, modifications of nucleotide sequences encoding a protein of interest, amino acid and/or protein fusions, and gene silencing by expressing an inverted repeat into a gene of interest.

[0575] Resulting characteristics from the gene editing compositions and methods described herein may be evaluated. Chromosomal intervals that correlate with a phenotype or trait of interest can be identified. A variety of methods well known in the art are available for identifying chromosomal intervals. The boundaries of such chromosomal intervals are drawn to encompass markers that will be linked to the gene controlling the trait of interest. In other words, the chromosomal interval is drawn such that any marker that lies within that interval (including the terminal markers that define the boundaries of the interval) can be used as a marker for a particular trait. In one embodiment, the chromosomal interval comprises at least one QTL, and furthermore, may indeed comprise more than one QTL. Close proximity of multiple QTLs in the same interval may obfuscate the correlation of a particular marker with a particular QTL, as one marker may demonstrate linkage to more than one QTL. Conversely, e.g., if two markers in close proximity show co-segregation with the desired phenotypic trait, it is sometimes unclear if each of those markers identifies the same QTL or two different QTL. The term “quantitative trait locus” or “QTL” refers to a region of DNA that is associated with the differential expression of a quantitative phenotypic trait in at least one genetic background, e.g., in at least one breeding population. The region of the QTL encompasses or is closely linked to the gene or genes that affect the trait in question. An “allele of a QTL” can comprise multiple genes or other genetic factors within a contiguous genomic region or linkage group, such as a haplotype. An allele of a QTL can denote a haplotype within a specified window wherein said window is a contiguous genomic region that can be defined, and tracked, with a set of one or more polymorphic markers. A haplotype can be defined by the unique fingerprint of alleles at each marker within the specified window.

[0576] In addition to the double-strand break inducing agents, site-specific base conversions can also be achieved to engineer one or more nucleotide changes to create one or more edits into the genome. These include for example, a site-specific base edit mediated by an C⋅G to T⋅A or an A⋅T to G⋅C base editing deaminase enzymes (Gaudelli et al., Programmable base editing of A⋅T to G⋅C in genomic DNA without DNA cleavage.” Nature (2017); Nishida et al. “Targeted nucleotide editing using hybrid prokaryotic and vertebrate adaptive immune systems.” Science 353 (6305) (2016); Komor et al. “Programmable editing of a target base in genomic DNA without double-stranded DNA cleavage.” Nature 533 (7603) (2016):420-4. A catalytically “dead” or inactive Cas9 (dCas9), for example a catalytically inactive “dead” version of a Cas9 ortholog disclosed herein, fused to a cytidine deaminase or an adenine deaminase protein becomes a specific base editor that can alter DNA bases without inducing a DNA break. Base editors convert C→T (or G→A on the opposite strand) or an adenine base editor that would convert adenine to inosine, resulting in an A→G change within an editing window specified by the gRNA

Introduction of CRISPR-Cas System Components into a Cell

[0577] The methods and compositions described herein do not depend on a particular method for providing a composition to a cell, or for introducing a sequence into an organism or cell, only that the polynucleotide or polypeptide gains access to the interior of at least one cell of the organism. Introducing includes reference to the incorporation of a nucleic acid into a eukaryotic or prokaryotic cell where the nucleic acid may be incorporated into the genome of the cell, and includes reference to the transient (direct) provision of a nucleic acid, protein or polynucleotide-protein complex to the cell.

[0578] Methods for introducing polynucleotides or polypeptides or a polynucleotide-protein complex into cells or organisms are known in the art including, but not limited to, microinjection, electroporation, stable transformation methods, transient transformation methods, ballistic particle acceleration (particle bombardment), whiskers mediated transformation, Agrobacterium-mediated transformation, direct gene transfer, viral-mediated introduction, transfection, transduction, cell-penetrating peptides, mesoporous silica nanoparticle (MSN)-mediated direct protein delivery, topical applications, sexual crossing , sexual breeding, and any combination thereof.

[0579] For example, the guide polynucleotide (guide RNA, crNucleotide+tracrNucleotide, guide DNA and/or guide RNA-DNA molecule) can be introduced into a cell directly (transiently) as a single stranded or double stranded polynucleotide molecule. The guide RNA (or crRNA+tracrRNA) can also be introduced into a cell indirectly by introducing a recombinant DNA molecule comprising a heterologous nucleic acid fragment encoding the guide RNA (or crRNA+tracrRNA), operably linked to a specific promoter that is capable of transcribing the guide RNA (crRNA+tracrRNA molecules) in said cell. The specific promoter can be, but is not limited to, a RNA polymerase III promoter, which allow for transcription of RNA with precisely defined, unmodified, 5′- and 3′-ends (Ma et al., 2014, Mol. Ther. Nucleic Acids 3:e161; DiCarlo et al., 2013, Nucleic Acids Res. 41: 4336-4343; WO2015026887, published 26 Feb. 2015). Any promoter capable of transcribing the guide RNA in a cell can be used and includes a heat shock /heat inducible promoter operably linked to a nucleotide sequence encoding the guide RNA.

[0580] The Cas endonuclease, such as the Cas endonuclease described herein, can be introduced into a cell by directly introducing the Cas polypeptide itself (referred to as direct delivery of Cas endonuclease), the mRNA encoding the Cas protein, and/ or the guide polynucleotide/Cas endonuclease complex itself, using any method known in the art. The Cas endonuclease can also be introduced into a cell indirectly by introducing a recombinant DNA molecule that encodes the Cas endonuclease. The endonuclease can be introduced into a cell transiently or can be incorporated into the genome of the host cell using any method known in the art. Uptake of the endonuclease and/or the guided polynucleotide into the cell can be facilitated with a Cell Penetrating Peptide (CPP) as described in WO2016073433 published 12 May 2016. Any promoter capable of expressing the Cas endonuclease in a cell can be used and includes a heat shock /heat inducible promoter operably linked to a nucleotide sequence encoding the Cas endonuclease.

[0581] Direct delivery of a polynucleotide modification template into plant cells can be achieved through particle mediated delivery, and any other direct method of delivery, such as but not limiting to, polyethylene glycol (PEG)-mediated transfection to protoplasts, whiskers mediated transformation, electroporation, particle bombardment, cell-penetrating peptides, or mesoporous silica nanoparticle (MSN)-mediated direct protein delivery can be successfully used for delivering a polynucleotide modification template in eukaryotic cells, such as plant cells.

[0582] The donor DNA can be introduced by any means known in the art. The donor DNA may be provided by any transformation method known in the art including, for example, Agrobacterium-mediated transformation or biolistic particle bombardment. The donor DNA may be present transiently in the cell or it could be introduced via a viral replicon. In the presence of the Cas endonuclease and the target site, the donor DNA is inserted into the transformed plant's genome.

[0583] Direct delivery of any of the guided Cas system components can be accompanied by direct delivery (co-delivery) of other mRNAs that can promote the enrichment and/or visualization of cells receiving the guide polynucleotide/Cas endonuclease complex components. For example, direct co-delivery of the guide polynucleotide/Cas endonuclease components (and/or guide polynucleotide/Cas endonuclease complex itself) together with mRNA encoding phenotypic markers (such as but not limiting to transcriptional activators such as CRC (Bruce et al. 2000 The Plant Cell 12:65-79) can enable the selection and enrichment of cells without the use of an exogenous selectable marker by restoring function to a non-functional gene product as described in WO2017070032 published 27 Apr. 2017.

[0584] Introducing a guide RNA/Cas endonuclease complex described herein, (representing the cleavage ready cascade described herein) into a cell includes introducing the individual components of said complex either separately or combined into the cell, and either directly (direct delivery as RNA for the guide and protein for the Cas endonuclease and cascade protein subunits, or functional fragments thereof) or via recombination constructs expressing the components (guide RNA, Cas endonuclease, cascade protein subunits, or functional fragments thereof). Introducing a guide RNA/Cas endonuclease complex into a cell includes introducing the guide RNA/Cas endonuclease complex as a ribonucleotide-protein into the cell. The ribonucleotide-protein can be assembled prior to being introduced into the cell as described herein. The components comprising the guide RNA/Cas endonuclease ribonucleotide protein (at least one Cas endonuclease, at least one guide RNA, at least one cascade protein subunits) can be assembled in vitro or assembled by any means known in the art prior to being introduced into a cell (targeted for genome modification as described herein).

[0585] Plant cells differ from human and animal cells in that plant cells comprise a plant cell wall which may act as a barrier to the direct delivery of the RGEN ribonucleoproteins and/or of the direct delivery of the RGEN components.

[0586] Direct delivery of the ribonucleoproteins, representing the cleavage ready cascade described herein, into plant cells can be achieved through particle mediated delivery (particle bombardment. Based on the experiments described herein, a skilled artesian can now envision that any other direct method of delivery, such as but not limiting to, polyethylene glycol (PEG)-mediated transfection to protoplasts, electroporation, cell-penetrating peptides, or mesoporous silica nanoparticle (MSN)-mediated direct protein delivery, can be successfully used for delivering RGEN ribonucleoproteins into plant cells.

[0587] Direct delivery of the ribonucleoprotein, allows for genome editing at a target site in the genome of a cell which can be followed by rapid degradation of the complex, and only a transient presence of the complex in the cell. This transient presence of the RGEN complex may lead to reduced off-target effects. In contrast, delivery of RGEN components (guide RNA, endonuclease) via plasmid DNA sequences can result in constant expression of RGENs from these plasmids which can intensify off target effects (Cradick, T. J. et al. (2013) Nucleic Acids Res 41:9584-9592; Fu, Y et al. (2014) Nat. Biotechnol. 31:822-826).

[0588] Direct delivery can be achieved by combining any one component of the guide RNA/Cas endonuclease complex (RGEN), representing the cleavage ready cascade described herein, (such as at least one guide RNA, at least one Cas protein, and at least one cascade protein), with a particle delivery matrix comprising a microparticle (such as but not limited to of a gold particle, tungsten particle, and silicon carbide whisker particle) (see also WO2017070032 published 27 Apr. 2017).

[0589] In one aspect the guide polynucleotide/Cas endonuclease complex, is a complex wherein the guide RNA and Cas endonuclease protein forming the guide RNA/Cas endonuclease complex are introduced into the cell as RNA and protein, respectively.

[0590] In one aspect the guide polynucleotide/Cas endonuclease complex, is a complex wherein the guide RNA and Cas endonuclease protein and the at least one protein subunit of a cascade forming the guide RNA/Cas endonuclease complex are introduced into the cell as RNA and proteins, respectively.

[0591] In one aspect the guide polynucleotide/Cas endonuclease complex, is a complex wherein the guide RNA and Cas endonuclease protein and the at least one protein subunit of a cascade forming the guide RNA/Cas endonuclease complex (cleavage ready cascade) are preassembled in vitro and introduced into the cell as a ribonucleotide-protein complex.

[0592] Protocols for introducing polynucleotides, polypeptides or polynucleotide-protein complexes into eukaryotic cells, such as plants or plant cells are generally known.

[0593] Alternatively, polynucleotides may be introduced into plant or plant cells by contacting cells or organisms with a virus or viral nucleic acids. Generally, such methods involve incorporating a polynucleotide within a viral DNA or RNA molecule. In some examples a polypeptide of interest may be initially synthesized as part of a viral polyprotein, which is later processed by proteolysis in vivo or in vitro to produce the desired recombinant protein. Methods for introducing polynucleotides into plants and expressing a protein encoded therein, involving viral DNA or RNA molecules, are known, see, for example, U.S. Pat. Nos. 5,889,191, 5,889,190, 5,866,785, 5,589,367 and 5,316,931.

### Cells and Plants

[0594] The presently disclosed polynucleotides and polypeptides can be introduced into a cell. Cells include, but are not limited to, human, non-human, animal, mammalian, bacterial, fungal, insect, yeast, non-conventional yeast, and plant cells as well as plants and seeds produced by the methods described herein. Any plant can be used with the compositions and methods described herein, including monocot and dicot plants, and plant elements.

[0595] Examples of monocot plants that can be used include, but are not limited to, corn (Zea mays), rice (Oryza sativa), rye (Secale cereale), sorghum (Sorghum bicolor, Sorghum vulgare), millet (e.g., pearl millet (Pennisetum glaucum), proso millet (Panicum miliaceum), foxtail millet (Setaria italica), finger millet (Eleusine coracana)), wheat (Triticum species, for example Triticum aestivum, Triticum monococcum), sugarcane (Saccharum spp.), oats (Avena), barley (Hordeum), switchgrass (Panicum virgatum), pineapple (Ananas comosus), banana (Musa spp.), palm, ornamentals, turfgrasses, and other grasses.

[0596] Examples of dicot plants that can be used include, but are not limited to, soybean (Glycine max), Brassica species (for example but not limited to: oilseed rape or Canola) (Brassica napus, B. campestris, Brassica rapa, Brassica. juncea), alfalfa (Medicago sativa), tobacco (Nicotiana tabacum), Arabidopsis (Arabidopsis thaliana), sunflower (Helianthus annuus), cotton (Gossypium arboreum, Gossypium barbadense), and peanut (Arachis hypogaea), tomato (Solanum lycopersicum), potato (Solanum tuberosum).

[0597] Additional plants that can be used include safflower (Carthamus tinctorius), sweet potato (Ipomoea batatus), cassava (Manihot esculenta), coffee (Coffea spp.), coconut (Cocos nucifera), citrus trees (Citrus spp.), cocoa (Theobroma cacao), tea (Camellia sinensis), banana (Musa spp.), avocado (Persea americana), fig (Ficus casica), guava (Psidium guajava), mango (Mangifera indica), olive (Olea europaea), papaya (Carica papaya), cashew (Anacardium occidentale), macadamia (Macadamia integrifolia), almond (Prunus amygdalus), sugar beets (Beta vulgaris), vegetables, ornamentals, and conifers.

[0598] Vegetables that can be used include tomatoes (Lycopersicon esculentum), lettuce (e.g., Lactuca sativa), green beans (Phaseolus vulgaris), lima beans (Phaseolus limensis), peas (Lathyrus spp.), and members of the genus Cucumis such as cucumber (C. sativus), cantaloupe (C. cantalupensis), and musk melon (C. melo). Ornamentals include azalea (Rhododendron spp.), hydrangea (Macrophylla hydrangea), hibiscus (Hibiscus rosasanensis), roses (Rosa spp.), tulips (Tulipa spp.), daffodils (Narcissus spp.), petunias (Petunia hybrida), carnation (Dianthus caryophyllus), poinsettia (Euphorbia pulcherrima), and chrysanthemum.

[0599] Conifers that may be used include pines such as loblolly pine (Pinus taeda), slash pine (Pinus elliotii), ponderosa pine (Pinus ponderosa), lodgepole pine (Pinus contorta), and Monterey pine (Pinus radiata); Douglas fir (Pseudotsuga menziesii); Western hemlock (Tsuga canadensis); Sitka spruce (Picea glauca); redwood (Sequoia sempervirens); true firs such as silver fir (Abies amabilis) and balsam fir (Abies balsamea); and cedars such as Western red cedar (Thuja plicata) and Alaska yellow cedar (Chamaecyparis nootkatensis).

[0600] In certain embodiments of the disclosure, a fertile plant is a plant that produces viable male and female gametes and is self-fertile. Such a self-fertile plant can produce a progeny plant without the contribution from any other plant of a gamete and the genetic material comprised therein. Other embodiments of the disclosure can involve the use of a plant that is not self-fertile because the plant does not produce male gametes, or female gametes, or both, that are viable or otherwise capable of fertilization.

[0601] The present disclosure finds use in the breeding of plants comprising one or more introduced traits, or edited genomes.

[0602] A non-limiting example of how two traits can be stacked into the genome at a genetic distance of, for example, 5 cM from each other is described as follows: A first plant comprising a first transgenic target site integrated into a first DSB target site within the genomic window and not having the first genomic locus of interest is crossed to a second transgenic plant, comprising a genomic locus of interest at a different genomic insertion site within the genomic window and the second plant does not comprise the first transgenic target site. About 5% of the plant progeny from this cross will have both the first transgenic target site integrated into a first DSB target site and the first genomic locus of interest integrated at different genomic insertion sites within the genomic window. Progeny plants having both sites in the defined genomic window can be further crossed with a third transgenic plant comprising a second transgenic target site integrated into a second DSB target site and/or a second genomic locus of interest within the defined genomic window and lacking the first transgenic target site and the first genomic locus of interest. Progeny are then selected having the first transgenic target site, the first genomic locus of interest and the second genomic locus of interest integrated at different genomic insertion sites within the genomic window. Such methods can be used to produce a transgenic plant comprising a complex trait locus having at least 1, 2, 3, 4, 5, 6, 7, 8, 9, 10, 11, 12, 13, 14,15, 16, 17, 19, 19, 20, 21, 22, 23, 24, 25, 26, 27, 28, 29, 30, 31 or more transgenic target sites integrated into DSB target sites and/or genomic loci of interest integrated at different sites within the genomic window. In such a manner, various complex trait loci can be generated.

[0603] While the invention has been particularly shown and described with reference to a preferred embodiment and various alternate embodiments, it will be understood by persons skilled in the relevant art that various changes in form and details can be made therein without departing from the spirit and scope of the invention. For instance, while the particular examples below may illustrate the methods and embodiments described herein using a specific plant, the principles in these examples may be applied to any plant. Therefore, it will be appreciated that the scope of this invention is encompassed by the embodiments of the inventions recited herein and in the specification rather than the specific examples that are exemplified below. All cited patents, applications, and publications referred to in this application are herein incorporated by reference in their entirety, for all purposes, to the same extent as if each were individually and specifically incorporated by reference.

### EXAMPLES

[0604] In the following Examples, unless otherwise stated, parts and percentages are by weight and degrees are Celsius. It should be understood that these Examples, while indicating embodiments of the disclosure, are given by way of illustration only. From the above discussion and these Examples, one skilled in the art can make various changes and modifications of the disclosure to adapt it to various usages and conditions. Such modifications are also intended to fall within the scope of the appended claims

### Example 1: Identification of Type I-E CRISPR-Cas Components for Eukaryotic Genome Editing

[0605] To establish the capability of Type I-E CRISPR (clustered regularly interspaced palindromic repeats)-Cas (CRISPR associated) systems for genome editing in eukaryotes, as exemplified in maize, the genes involved in CRISPR RNA (crRNA) maturation (cas6 (cse3 or casE)), DNA target recognition (cas5 (cas5e or casD), cas7 (cse4 or casC), cse1 (casA, cas8, or cas8e) and cse2 (casB or small subunit) and DNA target cleavage (cas3) (Makarova, K. S. et al., 2011, Nature Rev. Microbiol. 9:467-477 and Makarova, K. S. et al., 2015, Nature Rev. Microbiol. 13:722-736) from the Type I-E CRISPR-Cas system from Streptococcus thermophilus DGCC7710 (Sth7710) were identified. This was accomplished by first retrieving the genomic sequence for Sth7710 (NCBI accession number: NZ_AWVZ00000000.1) and examining it for the presence of CRISPR repeats using minCED (Bland, C. et al. (2007) BMC Bioinformatics, 8:209). In total, 4 arrays of CRISPRs each with a different repeat sequence were identified. Next, genomic sequence regions adjacent to the identified CRISPR arrays (about 10 kb 5 prime and 3 prime) were examined for the presence of open-reading frames (ORFs) encoding proteins with homology to Cas3, the signature protein of Type I CRISPR-Cas systems, by comparisons with NCBI protein databases using the PSI-BLAST program (Altschul, S. F. et al., 1997, Nucleic Acids Res. 25:3389-3402). One of the CRISPR arrays comprising a 28 bp repeat with the sequence consensus of 5′-GTTTTTCCCGCACACGCGGGGGTGATCC-3′ (SEQ ID NO:1) was demonstrated to be adjacent to an ORF encoding a Cas3 protein. Next, genes encoding the other proteins typical of a Type I-E CRISPR-Cas system (Cas5, Cas6, Cas7, Cse1, Cse2, Cas1 and Cas2) (Makarova, K. S. et al., 2015, Nature Rev. Microbiol. 13:722-736) were also identified within the locus (SEQ ID NOs: 2-9). This was accomplished by first translating the ORFs between the cas3 gene and CRISPR array into proteins using ORF Finder (Stothard, P. (2000) Biotechniques 28:1102-1104) followed by comparisons with NCBI protein databases using the PSI-BLAST program (Altschul, S. F. et al., 1997). As shown in FIG. 1, the resulting genes produced an operon structure typical of a Type I-E CRISPR-Cas system (Makarova, K. S. et al., 2015, Nature Rev. Microbiol. 13:722-736). The genes and encoded proteins responsible for CRISPR RNA maturation (cas6), RNA directed DNA target recognition (cas5, cas7, cse1 and cse2) and DNA target cleavage (cas3) are listed in Table 1. The cast gene (SEQ ID NO:8) encoded the Casl protein (SEQ ID NO:16). The cast gene (SEQ ID NO:9) encoded the Cas2 protein (SEQ ID NO:17).

TABLE 1A
Sequence of Type I-E CRISPR-Cas genes and proteins
from Streptococcus thermophilus DGCC7710 responsible
for CRISPR RNA maturation, DNA target recognition
and cleavage (SEQ ID NOs: 2-15)

| Gene | Polynucleotide Sequence | Polypeptide Sequence |
|---|---|---|
| Name | (SEQ ID NO) | (SEQ ID NO) |
| cas5 | 2 | 10 |
| cas6 | 3 | 11 |
| cas7 | 4 | 12 |
| cse1 | 5 | 13 |
| cse2 | 6 | 14 |
| cas3 | 7 | 15 |

[0606] The methods described above were also used to identify the genes involved in CRISPR RNA (crRNA) maturation (cas6), DNA target recognition (cas5, cas7, cse1 and cse2) and DNA target cleavage (cas3) from other Type I-E CRISPR-Cas systems including but not limited to Streptococcus mutans (Smu), Peptostreptococcus anaerobius (Pan), Gardnerella vaginalis (Gva), Pseudomonas 1sp. S-6-2 (Psp), and Ralstonia solanacearum (Rso) (Table 1B).

TABLE 1B
Sequences of additional Type I-E CRISPR-Cas genes and proteins
from Streptococcus mutans (Smu), Peptostreptococcus anaerobius
(Pan), Gardnerella vaginalis (Gva), Pseudomonas sp.
S-6-2 (Psp), and Ralstonia solanacearum (Rso) responsible
for CRISPR RNA maturation, DNA target recognition and
cleavage (SEQ ID NOs: 237-296)

| Gene | Polynucleotide Sequence | Polypeptide Sequence |
|---|---|---|
| Name | (SEQ ID NO) | (SEQ ID NO) |
| Smu cas5 | 237 | 267 |
| Smu cas6 | 238 | 268 |
| Smu cas7 | 239 | 269 |
| Smu cse1 | 240 | 270 |
| Smu cse2 | 241 | 271 |
| Smu cas3 | 242 | 272 |
| Pan cas5 | 243 | 273 |
| Pan cas6 | 244 | 274 |
| Pan cas7 | 245 | 275 |
| Pan cse1 | 246 | 276 |
| Pan cse2 | 247 | 277 |
| Pan cas3 | 248 | 278 |
| Gva cas5 | 249 | 279 |
| Gva cas6 | 250 | 280 |
| Gva cas7 | 251 | 281 |
| Gva cse1 | 252 | 282 |
| Gva cse2 | 253 | 283 |
| Gva cas3 | 254 | 284 |
| Psp cas5 | 255 | 285 |
| Psp cas6 | 256 | 286 |
| Psp cas7 | 257 | 287 |
| Psp cse1 | 258 | 288 |
| Psp cse2 | 259 | 289 |
| Psp cas3 | 260 | 290 |
| Rso cas5 | 261 | 291 |
| Rso cas6 | 262 | 292 |
| Rso cas7 | 263 | 293 |
| Rso cse1 | 264 | 294 |
| Rso cse2 | 265 | 295 |
| Rso cas3 | 266 | 296 |

### Example 2: Optimization of Type I-E CRISPR-Cas Genes for Maize Genome Editing

[0607] To confer efficient expression in maize cells, the Type I-E CRISPR-Cas genes from Streptococcus thermophilus DGCC7710 (Sth7710) responsible for CRISPR RNA (crRNA) maturation (cash) and RNA guided DNA target recognition (cas5, cas7, cse1 and cse2) Makarova, K. S. et al., 2015, Nature Rev. Microbiol. 13:722-736), termed cascade (CRISPR-associated complex for antiviral defense) (Brouns, S. J. et al. (2008) Science. 321:960-964), were. Briefly, genes were codon optimized using Zea mays codon tables, conditioned for ideal GC content, and repetitive sequences and gene destabilizing features such as MITE and DST sites removed where possible. Since the Cas5, Cas6, Cas7, Cse1 and Cse2 Type I-E proteins form a multi-subunit protein complex (Brouns, S. J. et al. (2008) Science. 321:960-964, Sinkunas, T. et al. (2013) EMBO J. 32:385-394 and Makarova, K. S. et al., 2015, Nature Rev. Microbiol. 13:722-736), not all of the proteins encoded within these genes may need a nuclear localization signal (NLS) for localization to occur within the nucleus of a eukaryotic cell. Therefore, the maize codon optimized Sth7710 Type I-E cascade genes were engineered with and without a sequence encoding the NLS from the Simian virus 40 (SV40) (PKKKRKV, SEQ ID NO:18) as described in Table 2 for testing.

TABLE 2
sequences and gene products resulting from the combination
of the SV40 encoding nuclear localization sequence and Type
I-E genes cas5, cas6, cas7, cse1 and cse2 from Streptococcus thermophihis
DGCC7710 (SEQ ID NOs: 10-14, 19-35)

| | Polynucleotide Sequence | Polypeptide Sequence |
|---|---|---|
| Gene Name | (SEQ ID NO) | (SEQ ID NO) |
| cas5 no NLS | 19 | 10 |
| cas6 no NLS | 20 | 11 |
| cas7 no NLS | 21 | 12 |
| cse1 no NLS | 22 | 13 |
| cse2 no NLS | 23 | 14 |
| cas5 N terminal NLS | 24 | 30 |
| cas5 C terminal NLS | 25 | 31 |
| cse1 N terminal NLS | 26 | 32 |
| cas6 C terminal NLS | 27 | 33 |
| cas7 C terminal NLS | 28 | 34 |
| cse2 C terminal NLS | 29 | 35 |

[0608] The nucleotide sequences encoding the genes were then operably linked to a maize ubiquitin (UBI) promoter (SEQ ID NO:36), maize UBI 5 prime untranslated region (UTR) (SEQ ID NO:37), maize UBI intron 1 (SEQ ID NO:38) and suitable terminator by standard molecular biological techniques. The key components of the resulting Type I-E expression cassettes are illustrated in FIG. 2 and are listed in Table 3.

TABLE 3
Type I-E cascade gene expression cassettes for RNA
directed DNA target recognition from Streptococcus thermophilus
DGCC7710 (SEQ ID NOs: 39-49)

| Gene Expression Cassette Name | SEQ ID NO: |
|---|---|
| UBI cas5 no NLS | 39 |
| UBI cas6 no NLS | 40 |
| UBI cas7 no NLS | 41 |
| UBI cse1 no NLS | 42 |
| UBI cse2 no NLS | 43 |
| UBI cas5 N terminal NLS | 44 |
| UBI cas5 C terminal NLS | 45 |
| UBI cse1 N terminal NLS | 46 |
| UBI cas6 C terminal NLS | 47 |
| UBI cas7 C terminal NLS | 48 |
| UBI cse2 C terminal NLS | 49 |

[0609] To monitor Type I-E cascade complex formation and RNA guided target DNA binding in maize cells, a sequence encoding only the acidic transcriptional activator motif from the Arabidopsis CBF1 protein (AtCBF1) (SEQ ID NO:50) (Gilmour, S. J. et al., 1998, Plant J. 16:433-442) was maize codon optimized and linked to the cas5 and cse1 cascade genes. To establish the optimal linkage of the AtCBF1 activator motif to the cas5 and cse1 genes, different sequences encoding protein linkers, GRA or 30XQ, were used to join cas5 and cse1 genes with the sequence encoding the AtCBF1 activation motif (see FIGS. 3A, 3 B and 4). For the cas5 gene, the AtCBF1 transcriptional activator motif was linked to both the 5 and 3 prime ends of the gene versions comprising NLSs (SEQ ID NOs: 24 and 25) (see FIGS. 3A and B) resulting in SEQ ID NOs: 47-50. For the cse1 gene, the AtCBF1 transcriptional activator motif was only linked to the 5 prime end of the gene version comprising a NLS (SEQ ID NO:26) (see FIG. 4) resulting in SEQ ID NOs: 55 and 56. The key components of the resulting AtCBF1 transcriptional activator fused cas5 and cse1 genes are listed in Table 4.

TABLE 4
Key components comprising the AtCBF1 transcriptional activator linked cas5
and cse1 genes from Streptococcus thermophilus DGCC7710 (SEQ ID NOs: 51-62),
If a particular sequence is not applicable, it is indicated with a N/A,

| | Coordinates | | | Coordinates of | |
|---|---|---|---|---|---|
| AtCBF1 linked | of AtCBF1 | Coordinates of | Coordinates of | cas5 or cse1 | Gene |
| cas5 or cse1 | transcriptional | sequence | sequence | gene | Product |
| gene | activator | encoding 30XQ | encoding GRA | comprising a | (SEQ ID |
| (SEQ ID NO) | motif | linker | linker | NLS | NO) |
| 51 (cas5) | 1-297 | 298-402 | N/A | 403-1164 | 57 |
| 52 (cas5) | 1-297 | N/A | 298-306 | 307-1068 | 58 |
| 53 (cas5) | 871-1164 | 766-870 | N/A | 1-765 | 59 |
| 54 (cas5) | 775-1071 | N/A | 766-774 | 7-765 | 60 |
| 55 (cse1) | 1-297 | 298-402 | N/A | 403-2097 | 61 |
| 56 (cse1) | 1-297 | N/A | 298-306 | 307-2001 | 62 |

[0610] For use as a positive control in targeted DNA binding and gene activation in maize cells, the Streptococcus pyogenes (Spy) cas9 gene comprising N- and C-terminal NLSs and the ST-LS1 Intron 2, for example described in US patent application WO2015026883A1 and Svitashev et al. (2015) Plant Physiology). 169:931-945 (SEQ ID NO:63) was modified as described in Jinek, M. et al., 2012, Science. 337:816-821 to generate a cleavage inactive or deactivated Spy Cas9 (Spy dCas9). These modifications introduced a pair of alanine substitutions at positions 19 and 849 of the expressed protein (comprising C- and N-terminal NLSs) (SEQ ID NO:64). Next, the sequence encoding the transcriptional activator motif from AtCBF1 (SEQ ID NO:50) was linked to the 3 prime end of the Spy dcas9 gene using two different sequences encoding protein linkers, 30XQ or GRA, and maize codon optimized in the context of the Spy dcas9 gene resulting in genes SEQ ID NO:65 and SEQ ID NO:66. The key components of the resulting AtCBF1 transcriptional activator fused Spy dcas9 genes are listed in Table 5.

TABLE 5
Key components comprising the AtCBF1 transcriptional activator linked Spy dcas9 genes (SEQ
ID NOs: 65-68), If a particular sequence is not applicable, it is indicated with a N/A.

| | Coordinates of | | | | |
|---|---|---|---|---|---|
| | Spy dcas9 | | | | |
| | gene | Coordinates of | Coordinates of | Coordinates of | Gene |
| AtCBF1 linked | comprising | sequence | sequence | AtCBF1 | Product |
| Spy dcas9 gene | NLSs and ST- | encoding 30XQ | encoding GRA | transcriptional | (SEQ ID |
| (SEQ ID NO) | LS1 Intron 2 | linker | linker | activator motif | NO) |
| 65 | 1-4374 | 4375-4479 | N/A | 4480-4776 | 67 |
| 66 | 1-4374 | N/A | 4375-4383 | 4384-4680 | 68 |

[0611] Next, the AtCBF1 transcriptional activator fused genes (cas5, cse1 and Spy dcas9) were then operably linked to a maize UBI promoter (SEQ ID NO:36), maize UBI 5 prime UTR (SEQ ID NO:37), maize UBI intron 1 (SEQ ID NO:38) and suitable terminator by standard molecular biological techniques. The key components of the resulting AtCBF1 transcriptional activator linked gene expression cassettes are illustrated in FIG. 5A and B and the respective sequences are listed in Table 6.

TABLE 6
expression cassettes for cas5, cse1 and Spy dcas9 genes linked to
the AtCBF1 transcriptional activation motif (SEQ ID NOs: 69-76)

| Gene Expression | SEQ |
|---|---|
| Cassette Name | ID NO: |
| UBI cas5 gene with N-terminal | 69 |
| NLS linked by 30XQ to AtCBF1 motif | |
| UBI cas5 gene with N-terminal | 70 |
| NLS linked by GRA to AtCBF1 motif | |
| UBI cas5 gene with C-terminal | 71 |
| NLS linked by 30XQ to AtCBF1 motif | |
| UBI cas5 gene with C-terminal | 72 |
| NLS linked by GRA to AtCBF1 motif | |
| UBI cse1 gene with N-terminal | 73 |
| NLS linked by 30XQ to AtCBF1 motif | |
| UBI cse1 gene with N-terminal | 74 |
| NLS linked by GRA to AtCBF1 motif | |
| UBI Spy dcas9 gene linked | 75 |
| with AtCBF1 transcriptional activator by 30XQ | |
| UBI Spy dcas9 gene linked with | 76 |
| AtCBF1 transcriptional activator by GRA | |

[0612] The multi-protein complex comprised of Cas5, Cas6, Cas7, Cse1 and Cse2 Type I-E Sth7710 proteins, termed cascade, is directed by small CRISPR RNAs (referred to herein as guide RNAs) to bind DNA target sites (Jore, M. M. et al. (2011) Nat. Struct. Mol. Biol. 18:529-536 and Sinkunas, T. et al. (2013) EMBO J. 32:385-394). These guide RNAs are comprised of a ˜33 nt sequence that serves to direct cascade DNA target recognition by base pairing with one strand of the DNA target site (cascade variable targeting domain) that is adjacent to an appropriate protospacer adjacent motif (PAM) (Jore, M. M. et al. (2011) Nat. Struct. Mol. Biol. 18:529-536 and Sinkunas, T. et al. (2013) EMBO J. 32:385-394). Flanking the ˜33 nt variable targeting domain are fixed sequences comprised of a ˜7 nt 5 prime sequence and a ˜21 nt 3 prime hairpin comprising sequence (FIG. 6). These fixed flanking sequences are the result of cleavage within the repeat sequences of the primary CRISPR array transcript by the Cas6 (Cse3) protein in Type I-E CRISPR-Cas systems (FIG. 6) (Gesner, E. M. et al. (2011) Nat. Struct. Mol. Biol. 18:688-692). To transcribe small RNAs necessary for directing cascade complex DNA target recognition and binding in maize cells, a U6 polymerase III promoter (SEQ ID NO:77) and terminator (TTTTTTTT) were isolated from maize and operably fused to the ends of DNA sequences mimicking a Type I-E CRISPR array as shown in FIG. 7 so that upon transcription the Cas6 protein may recognize the CRISPR array transcript and process it into separate guide RNAs. An important difference distinguishing a Type I-E CRISPR array from the array was that the cascade variable targeting domain was now altered to comprise DNA sequences (adjacent to an appropriate PAM) that may be found in maize cells. Additionally, a construct was assembled to test the ability of Type I-E guide RNAs to be transcribed from a polymerase II promoter. This plasmid DNA transcriptional cassette comprised the maize UBI promoter (SEQ ID NO:36), maize UBI 5 prime UTR (SEQ ID NO:37), maize UBI intron 1 (SEQ ID NO:38) and CRISPR array followed by a suitable polymerase II terminator (FIG. 8). The Type I-E guide RNA transcribed from these cassettes (after ribonuclease cleavage by Cas6) is as listed in SEQ ID NO:78 (Ns represent the variable targeting domain where any nucleotide may be present). To target the GACT expression construct described in Example 4 for gene activation in maize cells, three 33 nt sequences 3 prime of an appropriate PAM for Sth7710 Type I-E cascade (A or AA) (Sinkunas, T. et al. (2013) EMBO 1 32:385-394) capable of binding to 4 target sites upstream of the 35S CAMV minimal promoter were captured and placed into an array (SEQ ID NO:79). Next, the GACT targeting array was synthesized (GeneScript) and cloned into the polymerase II and III guide RNA expression constructs described herein resulting in SEQ ID NOs: 80 and 81, respectively.

[0613] To enable DNA target cleavage following DNA target recognition, the gene encoding the Type I-E endonuclease, cas3, from Sth7710 (SEQ ID NO:7) was maize codon optimized (SEQ ID NO:82). In order to eliminate its expression in coli and Agrobacterium, the potato ST-LS1 intron 2 (SEQ ID NO:83) was introduced resulting in SEQ ID NO:84. The gene product of the Sth7710 cas3 gene was also converted into a nickase by altering the codon at positions 1543-1545 to encode an alanine instead of an aspartic acid resulting in SEQ ID NO:85. This change has been previously reported to abolish the helicase activity of Sth7710 Cas3 resulting in a Cas3 variant which nicks one strand of the double-stranded DNA target site recognized by the cascade complex (Sinkunas, T. et al. (2013) EMBO J. 32:385-394). To facilitate nuclear localization of the Cas3 endonuclease protein and its variant(s) in maize cells, a nucleotide sequence encoding the Simian virus 40 (SV40) monopartite nuclear localization signal (PKKKRKV, SEQ ID NO:18) was included on either the 5 prime end, 3 prime end or both 5 and 3 prime ends of the cas3 genes described above resulting in the sequences and gene products listed in Table 7.

TABLE 7
Gene sequences and products for the cas3 gene
and variants from Streptococcus thermophilus
DGCC7710 (Sth7710) (SEQ ID NOs: 86-97)

| | Gene | Gene |
|---|---|---|
| | Sequence | Product |
| | (SEQ | (SEQ |
| Gene Name | ID NO:) | ID NO:) |
| cas3 with N-terminal NLS | 86 | 92 |
| cas3 with C-terminal NLS | 87 | 93 |
| cas3 with both N- and C-terminal NLSs | 88 | 94 |
| cas3 nickase with N-terminal NLS | 89 | 95 |
| cas3 nickase with C-terminal NLS | 90 | 96 |
| cas3 nickase with both | 91 | 97 |
| N- and C-terminal NLSs | | |

[0614] The nucleotide sequences encoding the cas3 genes were then operably linked to a maize UBI promoter (SEQ ID NO:36), maize UBI 5 UTR (SEQ ID NO:37), maize UBI intron 1 (SEQ ID NO:38) and suitable terminator by standard molecular biological techniques. The sequences of the resulting Type I-E expression cassettes are listed in Table 8.

TABLE 8A
Type I-E cas3 gene expression cassettes (SEQ ID NOs: 98-103)

| Gene Expression Cassette Name | SEQ ID NO: |
|---|---|
| UBI cas3 with N-terminal NLS | 98 |
| UBI cas3 with C-terminal NLS | 99 |
| UBI cas3 with both N- and C-terminal NLSs | 100 |
| UBI cas3 nickase with N-terminal NLS | 101 |
| UBI cas3 nickase with C-terminal NLS | 102 |
| UBI cas3 nickase with both N- and C-terminal NLSs | 103 |

[0615] Another approach to enable DNA cleavage is to link a nuclease domain (for example but not limited to the nuclease domain of a Type II restriction endonuclease (i.e. FokI (Kim, Y. et al. (1996) Proc. Natl. Acad. Sci. USA. 93:1156-1160) or a nuclease domain from a homing endonuclease (i.e. I-TevI (Van Roey, P. et al. (2002) Nat. Struct. Biol. 9:806-811) to a subunit of the cascade complex. To accomplish this, a sequence encoding the amino terminal cleavage domain of the GIY-YIG homing endonuclease I-TevI (SEQ ID NO:165) was (SEQ ID NO:166) and appended to the 5 prime end of the cas6 (SEQ ID NO:20) and cse1 (SEQ ID NO:22) genes. To establish optimal linkage between the cascade subunit and the I-TevI nuclease domain (if needed), sequences encoding 3 different protein linker variants (GRA, (G₂S)₃, and XTEN) were also included between the sequences encoding the nuclease domain and the cascade gene. To ensure nuclear localization, sequences encoding the SV40 NLS (PKKKRKV, SEQ ID NO:18) were added to the 3 prime end of each gene. Then, to eliminate expression in E. coli and Agrobacterium, the potato ST-LS1 intron 2 (SEQ ID NO:83) was introduced into each gene variant resulting in the nuclease linked cascade genes listed in Table 8B.

TABLE 8B
Gene sequences and products for the nuclease enabled
cas6 and cse1 genes from Streptococcus thermophilus
DGCC7710 (Sth7710) (SEQ ID NOs: 167-182)

| | Gene | Gene |
|---|---|---|
| | Sequence | Product |
| | (SEQ | (SEQ |
| Gene Name | ID NO:) | ID NO:) |
| Nuclease enabled | 167 | 175 |
| I-Tevl:cas6:NLS | | |
| Nuclease enabled | 168 | 176 |
| I-Tevl:GRA:cas6:NLS | | |
| Nuclease enabled | 169 | 177 |
| I-Tevl:(G₂S)₃:cas6:NLS | | |
| Nuclease enabled | 170 | 178 |
| I-Tevl:XTEN:cas6:NLS | | |
| Nuclease enabled | 171 | 179 |
| I-Tevl:cse1:NLS | | |
| Nuclease enabled | 172 | 180 |
| I-Tevl:GRA:cse1:NLS | | |
| Nuclease enabled | 173 | 181 |
| I-Tevl:(G₂S)₃:cse1:NLS | | |
| Nuclease enabled | 174 | 182 |
| I-Tevl:XTEN:cse1:NLS | | |

[0616] The nucleotide sequences encoding the nuclease equipped cas6 (SEQ ID NOs: 167-170) and cse1 (SEQ ID NOs: 171-174) genes were then operably linked to a maize UBI promoter (SEQ ID NO:36), maize UBI 5 UTR (SEQ ID NO:37), maize UBI intron 1 (SEQ ID NO:38) and suitable terminator by standard molecular biological techniques. The sequences of the resulting nuclease enabled Type I-E expression cassettes are listed in Table 8C.

TABLE 8C
Type I-E nuclease enabled cas6 and cse1 gene
expression cassettes (SEQ ID NOs: 183-190)

| Gene Expression Cassette Name | SEQ ID NO: |
|---|---|
| UBI nuclease enabled I-Tevl:cas6:NLS | 183 |
| UBI nuclease enabled I-Tevl:GRA:cas6:NLS | 184 |
| UBI nuclease enabled I-Tevl:(G₂S)₃:cas6:NLS | 185 |
| UBI nuclease enabled I-Tevl:XTEN:cas6:NLS | 186 |
| UBI nuclease enabled I-Tevl:cse1:NLS | 187 |
| UBI nuclease enabled I-Tevl:GRA:cse1:NLS | 188 |
| UBI nuclease enabled I-Tevl:(G₂S)₃:cse1:NLS | 189 |
| UBI nuclease enabled I-Tevl:XTEN:cse1:NLS | 190 |

### Example 3: Transformation of Type I-E Cascade and Guide Polynucleotide(s) for Genome Manipulation

[0617] In some aspects, the compositions disclosed herein may be utilized to modify the transcriptional status of a gene or a target polynucleotide in the genome of a cell. In some aspects, said cell is a eukaryotic cell. In one example of a eukaryotic cell, a plant cell is used. Transformation of a eukaryotic cell with a Type I-E cascade and associated guide polynucleotide can be accomplished by various methods known to be effective in plants, including particle-mediated delivery, Agrobacterium-mediated transformation, PEG-mediated delivery, and electroporation. It is appreciated that any method known in the art may be utilized. Example methods are described below.

### Particle-Mediated Delivery

[0618] Transformation of maize immature embryos using particle delivery is performed as follows. Media recipes follow below.

[0619] The ears are husked and surface sterilized in 30% Clorox bleach plus 0.5% Micro detergent for 20 minutes, and rinsed two times with sterile water. The immature embryos are isolated and placed embryo axis side down (scutellum side up), 25 embryos per plate, on 560Y medium for 4 hours and then aligned within the 2.5-cm target zone in preparation for bombardment. Alternatively, isolated embryos are placed on 560L (Initiation medium) and placed in the dark at temperatures ranging from 26° C. to 37° C. for 8 to 24 hours prior to placing on 560Y for 4 hours at 26° C. prior to bombardment as described above.

[0620] Plasmids comprising the Type I cascade and associated guide polynucleotide and optionally donor DNA are constructed using standard molecular biology techniques and co-bombarded with plasmids containing the developmental genes ODP2 (AP2 domain transcription factor ODP2 (Ovule development protein 2); US20090328252 A1) and Wushel (US2011/0167516).

[0621] The plasmids and optionally donor DNA are precipitated onto 0.6 micrometer (average diameter) gold pellets using a water-soluble cationic lipid transfection reagent as follows. DNA solution is prepared on ice using 1 μg of plasmid DNA and optionally other constructs for co-bombardment such as 50 ng (0.5 μl) of each plasmid containing the developmental genes ODP2 (AP2 domain transcription factor ODP2 (Ovule development protein 2); US20090328252 A1) and Wuschel. To the pre-mixed DNA, 20 μl of prepared gold particles (15 mg/ml) and 5 μl of a water-soluble cationic lipid transfection reagent is added in water and mixed carefully. Gold particles are pelleted in a microfuge at 10,000 rpm for 1 min and supernatant is removed. The resulting pellet is carefully rinsed with 100 ml of 100% EtOH without resuspending the pellet and the EtOH rinse is carefully removed. 105 μl of 100% EtOH is added and the particles are resuspended by brief sonication. Then, 10 μl is spotted onto the center of each macrocarrier and allowed to dry about 2 minutes before bombardment.

[0622] Alternatively, the plasmids and DNA of interest are precipitated onto 1.1 μm (average diameter) tungsten pellets using a calcium chloride (CaCl2) precipitation procedure by mixing 100 μl prepared tungsten particles in water, 10 μl (1 μg) DNA in Tris EDTA buffer (1 total DNA), 100 μl 2.5 M CaCl2, and 10 μl 0.1 M spermidine. Each reagent is added sequentially to the tungsten particle suspension, with mixing. The final mixture is sonicated briefly and allowed to incubate under constant vortexing for 10 minutes. After the precipitation period, the tubes are centrifuged briefly, liquid is removed, and the particles are washed with 500 ml 100% ethanol, followed by a 30 second centrifugation. Again, the liquid is removed, and 105 μl of 100% ethanol is added to the final tungsten particle pellet. For particle gun bombardment, the tungsten/DNA particles are briefly sonicated. 10 μl of the tungsten/DNA particles is spotted onto the center of each macrocarrier, after which the spotted particles are allowed to dry about 2 minutes before bombardment.

[0623] The sample plates are bombarded at level #4 with a Biorad Helium Gun. All samples receive a single shot at 450 PSI, with a total of ten aliquots taken from each tube of prepared particles/DNA.

[0624] Following bombardment, the embryos are incubated on 560P (maintenance medium) for 12 to 48 hours at temperatures ranging from 26C to 37C, and then placed at 26C. After 5 to 7 days the embryos are transferred to 560R selection medium containing 3 mg/liter Bialaphos, and subcultured every 2 weeks at 26C. After approximately 10 weeks of selection, selection-resistant callus clones are transferred to 288J medium to initiate plant regeneration. Following somatic embryo maturation (2-4 weeks), well-developed somatic embryos are transferred to medium for germination and transferred to a lighted culture room. Approximately 7-10 days later, developing plantlets are transferred to 272V hormone-free medium in tubes for 7-10 days until plantlets are well established. Plants are then transferred to inserts in flats (equivalent to a 2.5″ pot) containing potting soil and grown for 1 week in a growth chamber, subsequently grown an additional 1-2 weeks in the greenhouse, then transferred to Classic 600 pots (1.6 gallon) and grown to maturity. Plants are monitored and scored for transformation efficiency, and/or modification of regenerative capabilities.

[0625] Initiation medium (560L) comprises 4.0 g/l N6 basal salts (SIGMA C-1416), 1.0 ml/l Eriksson's Vitamin Mix (1000X SIGMA-1511), 0.5 mg/1 thiamine HCl, 20.0 g/l sucrose, 1.0 mg/1 2,4-D, and 2.88 g/l L-proline (brought to volume with D-I H2O following adjustment to pH 5.8 with KOH); 2.0 g/l Gelrite (added after bringing to volume with D-I H2O); and 8.5 mg/l silver nitrate (added after sterilizing the medium and cooling to room temperature).

[0626] Maintenance medium (560P) comprises 4.0 g/l N6 basal salts (SIGMA C-1416), 1.0 ml/l Eriksson's Vitamin Mix (1000X SIGMA-1511), 0.5 mg/l thiamine HCl, 30.0 g/l sucrose, 2.0 mg/l 2,4-D, and 0.69 g/l L-proline (brought to volume with D-I H2O following adjustment to pH 5.8 with KOH); 3.0 g/l Gelrite (added after bringing to volume with D-I H2O); and 0.85 mg/l silver nitrate (added after sterilizing the medium and cooling to room temperature).

[0627] Bombardment medium (560Y) comprises 4.0 g/l N6 basal salts (SIGMA C-1416), 1.0 ml/l Eriksson's Vitamin Mix (1000X SIGMA-1511), 0.5 mg/l thiamine HCl, 120.0 g/l sucrose, 1.0 mg/l 2,4-D, and 2.88 g/l L-proline (brought to volume with D-I H2O following adjustment to pH 5.8 with KOH); 2.0 g/l Gelrite (added after bringing to volume with D-I H2O); and 8.5 mg/1 silver nitrate (added after sterilizing the medium and cooling to room temperature).

[0628] Selection medium (560R) comprises 4.0 g/l N6 basal salts (SIGMA C-1416), 1.0 ml/l Eriksson's Vitamin Mix (1000× SIGMA-1511), 0.5 mg/l thiamine HCl, 30.0 g/l sucrose, and 2.0 mg/l 2,4-D (brought to volume with D-I H2O following adjustment to pH 5.8 with KOH); 3.0 g/l Gelrite (added after bringing to volume with D-I H2O); and 0.85 mg/l silver nitrate and 3.0 mg/l bialaphos (both added after sterilizing the medium and cooling to room temperature).

[0629] Plant regeneration medium (288J) comprises 4.3 g/l MS salts (GIBCO 11117-074), 5.0 ml/l MS vitamins stock solution (0.100 g nicotinic acid, 0.02 g/l thiamine HCL, 0.10 g/l pyridoxine HCL, and 0.40 g/l glycine brought to volume with polished D-I H2O) (Murashige and Skoog (1962) Physiol. Plant. 15:473), 100 mg/l myo-inositol, 0.5 mg/l zeatin, 60 g/l sucrose, and 1.0 ml/l of 0.1 mM abscisic acid (brought to volume with polished D-I H2O after adjusting to pH 5.6); 3.0 g/l Gelrite (added after bringing to volume with D-I H2O); and 1.0 mg/l indoleacetic acid and 3.0 mg/l bialaphos (added after sterilizing the medium and cooling to 60° C.).

[0630] Hormone-free medium (272V) comprises 4.3 g/l MS salts (GIBCO 11117-074), 5.0 m1/1 MS vitamins stock solution (0.100 g/l nicotinic acid, 0.02 g/l thiamine HCL, 0.10 g/l pyridoxine HCL, and 0.40 g/1 glycine brought to volume with polished D-I H2O), 0.1 g/l myo-inositol, and 40.0 g/l sucrose (brought to volume with polished D-I H2O after adjusting pH to 5.6); and 6 g/l bacto-agar (added after bringing to volume with polished D-I H2O), sterilized and cooled to 60° C.

[0631] Agrobacterium-Mediated Transformation

[0632] Agrobacterium-mediated transformation is performed essentially as described in Djukanovic et al. (2006) Plant Biotech J 4:345-57. Briefly, 10-12 day old immature embryos (0.8-2.5 mm in size) are dissected from sterilized kernels and placed into liquid medium (4.0 g/L N6 Basal Salts (Sigma C-1416), 1.0 ml/L Eriksson's Vitamin Mix (Sigma E-1511), 1.0 mg/L thiamine HCl, 1.5 mg/L 2, 4-D, 0.690 g/L L-proline, 68.5 g/L sucrose, 36.0 g/L glucose, pH 5.2). After embryo collection, the medium is replaced with 1 ml Agrobacterium at a concentration of 0.35-0.45 OD550. Maize embryos are incubated with Agrobacterium for 5 min at room temperature, then the mixture is poured onto a media plate containing 4.0 g/L N6 Basal Salts (Sigma C-1416), 1.0 ml/L Eriksson's Vitamin Mix (Sigma E-1511), 1.0 mg/L thiamine HCl, 1.5 mg/L 2, 4-D, 0.690 g/L L-proline, 30.0 g/L sucrose, 0.85 mg/L silver nitrate, 0.1 nM acetosyringone, and 3.0 g/L Gelrite, pH 5.8. Embryos are incubated axis down, in the dark for 3 days at 20° C., then incubated 4 days in the dark at 28° C., then transferred onto new media plates containing 4.0 g/L N6 Basal Salts (Sigma C-1416), 1.0 ml/L Eriksson's Vitamin Mix (Sigma E-1511), 1.0 mg/L thiamine HCl, 1.5 mg/L 2, 4-D, 0.69 g/L L-proline, 30.0 g/L sucrose, 0.5 g/L MES buffer, 0.85 mg/L silver nitrate, 3.0 mg/L Bialaphos, 100 mg/L carbenicillin, and 6.0 g/L agar, pH 5.8. Embryos are subcultured every three weeks until transgenic events are identified. Somatic embryogenesis is induced by transferring a small amount of tissue onto regeneration medium (4.3 g/L MS salts (Gibco 11117), 5.0 ml/L MS Vitamins Stock Solution, 100 mg/L myo-inositol, 0.1 ?M ABA, 1 mg/L IAA, 0.5 mg/L zeatin, 60.0 g/L sucrose, 1.5 mg/L Bialaphos, 100 mg/L carbenicillin, 3.0 g/L Gelrite, pH 5.6) and incubation in the dark for two weeks at 28° C. All material with visible shoots and roots are transferred onto media containing 4.3 g/L MS salts (Gibco 11117), 5.0 ml/L MS Vitamins Stock Solution, 100 mg/L myo-inositol, 40.0 g/L sucrose, 1.5 g/L Gelrite, pH 5.6, and incubated under artificial light at 28° C. One week later, plantlets are moved into glass tubes containing the same medium and grown until they were sampled and/or transplanted into soil.

### Ribonucleoprotein Transformation

[0633] The components comprising the Type I cascade and associated guide polynucleotide(s) ribonucleoprotein (RNP) complex can be recombinantly expressed and purified. RNP complex assembly can be carried-out directly in the cell recombinantly expressing the components (Sinkunas, T. et al. (2013) EMBO J. 32:385-394). Following purification, the RNP complex(es) can be delivered by particle gun transformation as described in Svitashev, S. et al. (2016) Nat. Commun. 7:13274. Briefly, RNPs (and optionally DNA expression) are precipitated onto 0.6 mm (average diameter) gold particles (Bio-Rad, USA) using a water soluble cationic lipid TranslT-2020 (Minis, USA) as follows: 50 ml of gold particles (water suspension of 10 mg/ml) and 2 ml of TransIT-2020 water solution are added to the premixed RNPs (and optionally DNA expression vectors), mixed gently, and incubated on ice for 10 min. RNP/DNA-coated gold particles are then pelleted in a microfuge at 8,000 g for 30 s and supernatant is removed. The pellet is then resuspended in 50 ml of sterile water by brief sonication. Immediately after sonication, coated gold particles are loaded onto a microcarrier (10 ml each) and allowed to air dry. Immature maize embryos, 8-10 days after pollination, are then bombarded using a PDS-1000/He Gun (Bio-Rad, USA) with a rupture pressure of 425 pounds per inch square. Post-bombardment culture, selection, and plant regeneration are performed as previously described above.

### Variations in Delivery

[0634] Type I-E cascade, guide polynucleotide, and optionally associated nuclease can be delivered as DNA expression cassettes, RNA, messenger RNA (5′-capped and polyadenylated), or protein or combinations thereof. Cell lines or transformants can also be established stably expressing all but one or more of the components needed to form a functional guide polynucleotide/Cas complex so that upon delivery of the missing component(s) a functional guide polynucleotide/Cas complex can form.

### Sequence Verification of Genomic Polynucleotide Modification

[0635] Samples of a transformed plant are obtained and sequenced via any method known in the art, and compared to the genomic sequences of an isoline plant not transformed with the Type I-E cascade, guide polynucleotide, and associated nuclease. The presence of non-homologous end-joining (NHEJ) insertion and/or deletion (indel) mutations resulting from DNA repair can also be used as a signature to detect cleavage activity.

### Example 4: Demonstration of Type I-E Cascade Complex Formation in Maize Cells

[0636] In this example, methods for examining the functional formation of a Type I-E cascade and guide RNA complex in eukaryotic cells, particularly plant cells, are described.

[0637] In one method, the functional formation of a Type I cascade and guide RNA(s) were monitored by an immunofluorescent gene activation assay. This was accomplished by constructing a DNA expression cassette in such a way that in the absence of cascade, guide RNA complex formation no or very basal expression of a fluorescent protein would be detected while in the presence of cascade guide RNA complex formation a gene encoding a fluorescent protein would be activated resulting in detectable fluorescence. This DNA expression cassette comprised an upstream region where cascade and guide RNA complex(es) may bind (SEQ ID NO:104), a minimal 35S promoter from the cauliflower mosaic virus (CMV) (SEQ ID NO:105), a 5 prime untranslated region (UTR) from the tobacco mosaic virus (TMV) (SEQ ID NO:106), a region encoding the Ds-Red Express fluorescent protein (BD Bioscience) (SEQ ID NO:107) and a rice Ubiquitin terminator (SEQ ID NO:108). The key elements of this gene activation (GACT) DNA expression cassette are illustrated in FIG. 9 and sequence disclosed in SEQ ID NO:109.

[0638] Next, the concentration of GACT that provides minimal background fluorescence was established. This was accomplished by precipitating different concentrations (1 ng, 15 ng and 25 ng) of GACT onto gold particles (as described in Example 3), performing particle gun transformation (as described in Example 3) and examining the transformed immature maize embryos (IMEs) for Ds-Red expression using a fluorescent microscope (Nikon AZ100 (Nikon, Japan)) two days following transformation. Images were captured using a Nikon Digital Sight Ds-Fi1 camera (Nikon, Japan) and NIS-Elements BR software (version 4.00.07) (Nikon, Japan). The delivery of 1 ng and 15 ng of GACT by particle gun yielded low levels of background Ds-Red fluorescence so 15 ng was selected for use in future experiments.

[0639] Next, the ability to induce gene activation was confirmed by utilizing a Streptococcus pyogenes (Spy) dCas9 linked AtCBF1 expression cassettes (see Example 2) and Spy Cas9 guide RNA transcriptional cassettes constructed as described in US patent application WO 2015026883 A1 except the variable targeting domains were designed to direct the Spy dCas9 linked AtCBF1 to bind to 4 target sites 5 prime of the 35S CMV promoter in the GACT expression cassette. Particle gun transformation experiments were performed as described in Example 3, except immature embryos were harvested 2-4 days following transformation to evaluate gene activation. Transformation experiments were assembled in triplicate and triplicate and a visual marker DNA expression cassette encoding a cyan fluorescent protein (CFP) was also co-delivered to aid in the selection of evenly transformed immature embryos. Negative controls consisted of experiments conducted in the absence of a guide RNA. As shown in FIG. 10, both Spy dCas9 linked AtCBF1 expression cassettes produced detectable levels of fluorescence, however, the cassette where the Spy dCas9 and AtCBF1 protein were linked by a sequence encoding the GRA linker produced the highest frequency of gene activation.

[0640] Next, the ability to form and then direct cascade guide RNA complexes to DNA target sites in maize was assessed. Initially, the combination (and concentration) of cascade and guide RNA expression constructs listed in Table 9 were tested for their ability to activate gene expression. Out of the 6 combinations tested, one (Treatment 4, Table 9) seemed to induce low levels of Ds-Red gene activation over the negative controls (transformations assembled without a guide RNA). Next the effect of both temperature and guide RNA transcriptional cassette promoter (either polymerase II or polymerase III) (see Example 2) were examined. For the temperature treatment, transformation experiments were setup in duplicate with one set of embryos placed at 28° C. (typical for maize particle gun transformation) and the other set was placed immediately at 37° C. until it was evaluated two days later for Ds-Red gene activation. Transformation experiments were performed with the combination of cascade expression cassettes that provided an initial indication of gene activation (Treatment 4, Table 9) plus one other treatment incorporating the guide RNA transcriptional cassette utilizing the polymerase III promoter (SEQ ID NO:77). Surprisingly, Ds-Red gene activation was clearly noticeable in the maize embryos that had been incubated at 37° C. compared to the 28° C. temperature treatment (FIG. 11). Additionally, the promoter driving the guide RNA transcriptional cassette (either polymerase II or polymerase III) yielded near equivalent levels of Ds-Red fluorescence (FIG. 11).

TABLE 9
Combination and concentration of Streptococcus thermophilus DGCC7710 Type I-E
DNA expression cassettes co-precipitated onto gold particles

| | | | | | | | | | | | | Polymerase | | |
|---|---|---|---|---|---|---|---|---|---|---|---|---|---|---|
| | | | | | | | | | | | | II Guide RNA | GACT | |
| | Cascade Expression Cassette (SEQ ID NOs) | | | | | | | | | | | (SEQ ID | (SEQ ID | Visual |
| Treatment | 44 | 46 | 47 | 48 | 49 | 69 | 70 | 71 | 72 | 73 | 74 | NO: 80) | NO: 109) | Marker |
| | DNA Concentration (ng) Co-Precipitated onto Gold Particles | | | | | | | | | | | | | |
| 1 | — | 15 | 15 | 40 | 15 | 15 | — | — | — | — | — | 30 | 15 | 20 |
| 2 | — | 15 | 15 | 40 | 15 | — | 15 | — | — | — | — | 30 | 15 | 20 |
| 3 | — | 15 | 15 | 40 | 15 | — | — | 15 | — | — | — | 30 | 15 | 20 |
| 4 | — | 15 | 15 | 40 | 15 | — | — | — | 15 | — | — | 30 | 15 | 20 |
| 5 | 15 | — | 15 | 40 | 15 | — | — | — | — | 15 | — | 30 | 15 | 20 |
| 6 | 15 | — | 15 | 40 | 15 | — | — | — | — | — | 15 | 30 | 15 | 20 |

[0641] To further optimize the cascade complex for gene activation, the sequence encoding the AtCBF1 transcriptional activator motif (SEQ ID NO:50) was maize codon optimized and linked to the carboxyl termini (C-termini) of the cas6 and cse1 genes (SEQ ID NOs: 20 and 22, respectively) with a sequence encoding a SV40 NLS (SEQ ID NO:18) and ‘GRA’ linker being incorporated between the cas6 and cse1 genes and the AtCBF1 coding region. The resulting genes (SEQ ID NOs: 110 and 111) were then placed into a expression cassette resulting in SEQ ID NOs: 112 and 113 and tested for their gene activation potential as described above with the following exceptions. First, a new gene activation construct (GACT2) was built that contained just a single Spy dCas9 and cascade binding site (SEQ ID NO:114). Second, U6 polymerase III expression constructs encoding a Spy dCas9 and cascade guide RNA (SEQ ID NOs: 115 and 116, respectively) capable of targeting this new site were generated. A treatment assembled in the absence of a guide RNA served as a negative control while the Spy dCas9 linked (GRA) AtCBF1 (SEQ ID NO:76) and associated guide RNA (SEQ ID NO:115) expression constructs were used as a positive control. To enable a comparison with the Sth7710 cascade gene activation results obtained previously, Treatment 4 (Table 9) was also included. To test for an additive effect, cas5, cash, and cse1 linked AtCBF1 genes were also combined in a single treatment. DNA concentration of each cascade expression construct co-precipitated onto gold particles was as described in Table 10 and biolistic transformation was performed as described above. As shown in FIG. 12, Ds-Red gene activation was enhanced when AtCBF1 was linked to the C-termini of Cas6 and Cse1 relative to Cas5 (Treatment 4 (Table 10A)). Moreover, when combined, AtCBF1 linked Cas5, Cas6, and Cse1 Ds-Red gene activation visually surpassed that generated by Spy dCas9 linked (GRA) AtCBF1. Next, the amount of Ds-Red protein expressed was quantified using an Octet RED96 System (ForteBio, USA) as follows. Total protein was extracted from immature maize embryos (IMEs) two days after transformation and normalized to 1300 μg/mL. Then, a standard curve was generated by examining the binding rate (BR) of purified Ds-Red protein (Clontech) at known concentrations (500, 100, 25, 6.25 ng/mL) to a Ds-Red specific biosensor (Anti-Human IgG Fc coated with a DsRed antibody (Clontech)). BRs of the standards were then utilized to generate a standard curve and calculate the concentration of Ds-Red in the transformed IMEs. Each sample was measured in triplicate. As shown in Table 11, quantification of Ds-Red protein present in the transformed tissue further corroborated the fluorescence imaging.

[0642] Taken together, data indicate that Type I-E cascade and guide RNA may be engineered to form a functional complex in eukaryotic cells, particularly plant cells, and be used for plant gene transcriptional activation. Additionally, our data also indicates that the multi-subunit nature of the cascade complex provides the basis for a robust RNA guided platform for genome modification where multiple tools (e.g. polynucleotides, domains, motifs, and/or fusions resulting in transcriptional activation, transcriptional repression, cleavage, nicking, DNA methylation, chromatin modification, deamination, and others) may be affixed.

TABLE 10
Combination and concentration of Streptococcus thermophilus DGCC7710 Type I-E
DNA expression cassettes co-precipitated onto gold particles for optimization experiments

| | | | | | | | | | Polymerase | | |
|---|---|---|---|---|---|---|---|---|---|---|---|
| | | | | | | | | | II Guide RNA | GACT | |
| | Cascade Expression Cassette (SEQ ID NOs) | | | | | | | | (SEQ ID | (SEQ ID | Visual |
| Treatment | 44 | 46 | 47 | 48 | 49 | 72 | 112 | 113 | NO: 116) | NO: 114) | Marker |
| | DNA Concentration (ng) Co-Precipitated onto Gold Particles | | | | | | | | | | |
| 1 | — | 20 | 20 | 45 | 20 | 20 | — | — | 30 | 15 | 20 |
| 2 | 20 | 20 | — | 45 | 20 | — | 20 | — | 30 | 15 | 20 |
| 3 | 20 | — | 20 | 45 | 20 | — | — | 20 | 30 | 15 | 20 |
| 4 | — | — | — | 45 | 20 | 20 | 20 | 20 | 30 | 15 | 20 |

TABLE 11
Quantification of the amount of Ds-Red expressed in
S. thermophilus DGCC7710 Type I-E cascade and
S. pyogenes dCas9 gene activation experiments

| | Average | |
|---|---|---|
| | Ds-Red | |
| | Concentration | Standard Error |
| Treatment | (ppm) | Measurement |
| Cascade No Guide RNA | 5.2 | 1.4 |
| Cascade Cas5 AtCBF1 | 15.4 | 2.6 |
| Cascade Cas6 AtCBF1 | 21.2 | 3.2 |
| Cascade Cse1 AtCBF1 | 34.2 | 4.9 |
| Cascade Cas5, Cas6, Cse1 AtCBF1 | 102.2 | 11.7 |
| Spy dCas9 No Guide RNA | 10.0 | 1.1 |
| Spy dCas9 AtCBF1 | 54.7 | 5.3 |

### Example 5: Type I-E Cascade-Mediated Transcriptional Manipulation of a Eukaryotic Gene

[0643] In this example, the transcriptional activation of a eukaryotic, in particular plant, chromosomal gene with an engineered Type I-E cascade guide polynucleotide complex is described.

[0644] Since anthocyanin pigmentation may be used as a quantitative visual marker (Ludwig, S. R. et al. (1990) Science. 247: 449-450) for maize transformation, it was selected as a target for Sth7710 cascade endogenous gene activation. In the aleurone cell layer, maize anthocyanin pigmentation is activated through the coordinated action of two transcription factors R1 and C1 (Chandler, V. L. et al. (1989) Plant Cell. 1: 1175-1183, Grotewold, E. et al. (2000) PNAS. 97: 13579-13584 and Sharma, M. et al. (2011) Genetics. 188:69-79). Therefore, to induce anthocyanin production using Sth7710 cascade, the endogenous R1 gene was targeted for transcriptional up-regulation by cascade while over-expressing the C1 gene (FIG. 13) (alternate strategies include over-expression of the R1 gene combined with C1 gene activation, transcriptional activation of both the R1 and C1, and direct activation of Bzl). R1 gene activation was accomplished by first selecting 3 protospacer targets (adjacent to an appropriate PAM) in the promoter region of the R1 gene (see Table 12) (SEQ ID NOs: 117-119) and constructing U6 polymerase III expression constructs encoding Sth7710 cascade guide RNAs capable of targeting R1 (SEQ ID NOs: 123-125). Next, a C1 over-expression cassette was generated by operably linking the Cl coding DNA sequence (CDS) (SEQ ID NO:126) with a Cauliflower Mosaic Virus 35S (CAMV35S) enhancer (SEQ ID NO:127), Cauliflower Mosaic Virus (CMV) promoter (SEQ ID NO:128), TMV 5 prime UTR (SEQ ID NO:106), alcohol dehydrogenase 1 (ADH1) intron 1 (SEQ ID NO:129), and a terminator resulting in a chimeric Cl gene over-expression cassette (SEQ ID NO:130). For use as a positive control, a DNA expression cassette capable of over-expressing the R1 CDS was also generated (SEQ ID NO:132). It comprised a ubiquitin (UBI) promoter (SEQ ID NO:36), UBI 5′ UTR (SEQ ID NO:37), UBI intron 1 (SEQ ID NO:38), R1 CDS (SEQ ID NO:131), and a terminator. Next, biolistic transformation was carried-out as described in Example 3 using the expression constructs and associated concentrations (for loading onto gold particles) listed in Table 13. Paired with the C1 over-expression construct, each of the 3 guide RNAs for Sth7710 cascade targeting R1 were evaluated individually and in combination for their ability to upregulate anthocyanin production. To compare gene activation with Spy dCas9, three Spy dCas9 protospacer targets were selected in the promoter of the R1 gene (see Table 12) (SEQ ID NOs: 120-122) and U6 polymerase III transcriptional cassettes were generated (SEQ ID NOs: 133-135). To promote robust U6 polymerase III transcription, a G nucleotide (nt) was included at the beginning of the guide RNA if the Spy dCas9 protospacer target did not naturally start with one. Delivery of both R1 and C1 over-expression cassettes served as a positive control while experiments omitting the guide RNA expression construct provided a negative control. As shown in FIG. 14, an anthocyanin phenotype was observed for both Sth7710 cascade and Spy dCas9. Experiments utilizing all 3 guide RNAs, produced the highest levels of anthocyanin induction with cascade and Spy dCas9 yielding near equivalent signal (FIG. 14). By quantifying maize cells with an anthocyanin cellular phenotype (across 3 biological replicates) (Table 14), we further substantiate the finding that a Type I cascade complex may be used as a tool for manipulating gene expression in Zea mays.

TABLE 12
Maize chromosomal DNA targets selected in the
promoter region of the R1 gene

| | Location | | | SEQ | |
|---|---|---|---|---|---|
| | (B73 | PAM | | ID | PAM |
| Name | RefGen_v4) | (5′) | Protospacer Target | NO. | (3′) |
| A2+ | Chr 10: | AA | GAGGGTCTACTTCCATCA | 117 | — |
| | 139780885- | | CCGTCTTGCTCGGTC | | |
| | 139780919 | | | | |
| A4+ | Chr 10: | AA | CAGCAGTAGTGTTACAGA | 118 | — |
| | 139780833- | | AGCTAAACTCAACCA | | |
| | 139780867 | | | | |
| A1− | Chr 10: | AA | TTTATGGACAGAGCTCCA | 119 | — |
| | 139780942- | | AGTGACCGAGCAAGA | | |
| | 139780908 | | | | |
| A3+ | Chr 10: | — | GAGCTCCACCAAAGACAA | 120 | AGG |
| | 139780868- | | AG | | |
| | 139780890 | | | | |
| A7+ | Chr 10: | — | CAGTGCTATAATATGAGT | 121 | TGG |
| | 139780671- | | GG | | |
| | 139780693 | | | | |
| A2− | Chr 10: | — | CTCCAAGTGACCGAGCAA | 122 | CGG |
| | 139780927- | | GA | | |
| | 139780905 | | | | |

TABLE 13
Combination and concentration of Streptococcus thermophilus DGCC7710 Type I-E
DNA expression cassettes co-precipitated onto gold particles for endogenous gene activation
experiments

| | | | | | | | | | Polymerase III Guide | | | C1 Over- |
|---|---|---|---|---|---|---|---|---|---|---|---|---|
| | | | | | | | | | RNA Cassette (SEQ ID | | | Expression |
| | Cascade Expression Cassette (SEQ ID NOs) | | | | | | | | NOs) | | | Cassette (SEQ |
| Treatment | 44 | 46 | 47 | 48 | 49 | 72 | 112 | 113 | 123 | 124 | 125 | ID NO: 130) |
| | DNA Concentration (ng) Co-Precipitated onto Gold Particles | | | | | | | | | | | |
| 1 | — | — | — | 45 | 20 | 20 | 20 | 20 | — | — | — | 40 |
| 2 | — | — | — | 45 | 20 | 20 | 20 | 20 | 20 | — | — | 40 |
| 3 | — | — | — | 45 | 20 | 20 | 20 | 20 | — | 20 | — | 40 |
| 4 | — | — | — | 45 | 20 | 20 | 20 | 20 | — | — | 20 | 40 |
| 5 | — | — | — | 45 | 20 | 20 | 20 | 20 | 6.67 | 6.67 | 6.67 | 40 |

TABLE 14
Quantification of the number of anthocyanin “red”
cells in S. thermophilus DGCC7710 Type I-E cascade and
S. pyogenes dCas9 gene activation experiments

| | Average | |
|---|---|---|
| | Anthocyanin | Standard |
| | Positive | Error |
| Treatment | Cells | Measurement |
| Spy dCas9 AtCBF1 | 0 | 0 |
| No Guide RNA | | |
| Spy dCas9 AtCBF1 | 124.7 | 39.3 |
| Plus Guide RNAs Targeting R1 | | |
| Cascade Cas5, Cas6, | 0 | 0 |
| Cse1 AtCBF1 No Guide RNA | | |
| Cascade Cas5, Cas6, Cse1 | 152.7 | 18.9 |
| AtCBF1 Plus Guide RNAs Targeting R1 | | |

### Example 6: Type I-E Cascade-Mediated Cleavage of Eukaryotic Cellular DNA

[0645] In this example, the cleavage of DNA in eukaryotic, in particular plant, cells with an engineered Type I-E cascade guide polynucleotide complex is described.

[0646] Cascade by itself does not cleave DNA but only recognizes and binds its DNA target. To enable DNA cleavage, it can be combined with the exonuclease naturally associated with the CRISPR-Cas system, Cas3, or other nuclease(s) or nuclease domains (for example but not limited to a nuclease domain from a Type II restriction endonuclease (i.e., FokI (Kim, Y. et al. (1996) Proc. Natl. Acad. Sci. USA. 93:1156-1160)) or a nuclease domain from a homing endonuclease (i.e., I-Teel (Kleinstiver, B. et al. (2012) Proc. Natl. Acad. Sci. USA. 109:8061-8066)). Nucleases or nuclease domains may be recruited, associated with, linked to, fused to, assembled with or expressed as part of the cascade complex. Optionally, if a nickase (for example but not limited to an engineered Cas3 nickase (see Example 2)) or nuclease that requires dimerization (for example but not limited to a Type II restriction endonuclease (i.e. FokI (Kim, Y. et al. (1996) Proc. Natl. Acad. Sci. USA. 93:1156-1160) is utilized, two or more DNA target sites in close proximity and on opposite DNA strands or combinations thereof can be targeted to generate DNA double-strand break(s) (DSB(s)).

[0647] Once cleavage enabled, the cascade complex can be directed to DNA target sites by a guide RNA and monitored for the presence of insertion and deletion (indel) mutations indicative of target site cleavage and cellular non-homologous end-joining (NHEJ) DNA repair. This is carried-out by targeted deep sequencing as described in Karvelis, T. et al. (2015) Genome Biology. 16:253 (Methods Section: In planta mutation detection). Briefly, after 2 days, the 20-30 most evenly transformed immature maize embryos (IMEs) are harvested based on their fluorescence. Total genomic DNA is extracted and the region surrounding the intended target site is PCR amplified with Phusion® HighFidelity PCR Master Mix (New England Biolabs, M0531L) adding on the sequences necessary for amplicon-specific barcodes and Illumina sequencing using “tailed” primers through two rounds of PCR and deep sequenced. The resulting reads are examined for the presence of mutations at the expected site of cleavage by comparison to control experiments where the small RNA transcriptional cassette is omitted from the transformation.

[0648] As illustrated in FIG. 15, experiments were performed using cooperative nicking with an engineered Cas3 nickase (Example 2) and two cascade targets in close proximity (on opposite DNA strands). As shown in FIG. 16, this resulted in targeted chromosomal mutagenesis with the predominant repair of the DSB being large deletions (>10 bp) of variable length that typically originated within one of the cascade target sequences although small deletion (1 or 2 bp) mutations were also detected. In total, 4 pairs of cascade target sites (A2+/A1−, A2+/A3−, A4+/A1−, and A4+/A3−) (Table 15), varying both in distance from each other and target site orientation, were selected for testing with the Cas3 nickase. As shown in Table 15, all produced chromosomal mutations unique to the Cas3 nickase treatment, illustrating the target design flexibility of the cooperative cascade-Cas3 nickase approach described herein. Additionally, the mechanism of generating a DSB provided by an engineered Cas3 nickase is distinct from other genome editing tools: it results in more than one nicking event in a strand-specific manner (FIG. 15). This feature is novel and can be leveraged to enhance DNA repair outcomes. For example, the creation of multiple nicks on one strand would likely be acted on by repair processes to generate a single strand gap or gaps between adjacent nicks. Multiple nicks on both strands of a segment of DNA could then lead to a novel intermediate in which opposing gaps would be the equivalent of a double-strand break with 3′ or 5′ overhangs depending on orientation of the cascade targets. Both sets of overhangs would not be optimal substrates for NHEJ repair and 3′ overhangs in particular could be primarily acted upon by homologous recombination which normally uses 5′to 3′ exonucleases to initiate single strand formation. U6 polymerase III crRNA transcriptional constructs were assembled as described in Example 2. Transformation experiments were assembled using particle gun transformation as described in Example 3 except immature embryos were harvested 2-4 days following transformation. DNA expression constructs co-delivered onto gold particles was as listed in Table 16. Experiments assembled in the absence of a guide RNA served as a negative control. Mutations were detected by Illumina deep sequencing as described above.

TABLE 15
Pairs of Streptococcus thermophilus DGCC7710 cascade chromosomal
protospacer targets selected in the promoter region of the R1 gene
and associated mutation frequencies when combined with a Cas3 nickase

| | | Protospacer | | | |
|---|---|---|---|---|---|
| | Location of Protospacer and | Target SEQ ID | Unique | | |
| | PAM, Respectively (B73 | NOs, | Mutant | Total | % Mutant |
| Pair | RefGen_v4) | Respectively | Reads | Reads | Reads |
| A2+/A1− | Chr 10: 139780885- | 117/119 | 44 | 203,351 | 0.02% |
| | 139780919/ | | | | |
| | Chr 10: 139780942- | | | | |
| | 139780908 | | | | |
| A2+/A3− | Chr 10: 139780885- | 117/163 | 1,016 | 1,598,106 | 0.06% |
| | 139780919/ | | | | |
| | Chr 10: 139780847- | | | | |
| | 139780813 | | | | |
| A4+/A1− | Chr 10: 139780833- | 118/119 | 388 | 661,310 | 0.06% |
| | 139780867/ | | | | |
| | Chr 10: 139780942- | | | | |
| | 139780908 | | | | |
| A4+/A3− | Chr 10: 139780833- | 118/163 | 186 | 663,242 | 0.03% |
| | 139780867/ | | | | |
| | Chr 10: 139780847- | | | | |
| | 139780813 | | | | |

TABLE 16
Combination and concentration of Streptococcus thermophilus DGCC7710 Type I-E
DNA expression cassettes co-precipitated onto gold particles for experiments targeting
chromosomal sites with Cas3 nickase

| | | | | | | Polymerase III Guide | | | | Cas3 Nickase | |
|---|---|---|---|---|---|---|---|---|---|---|---|
| | Cascade Expression Cassette | | | | | RNA Cassette (SEQ ID | | | | Expression | |
| | (SEQ ID NOs) | | | | | NOs) | | | | Cassette (SEQ | Visual |
| Treatment | 44 | 46 | 47 | 48 | 49 | 123 | 124 | 125 | 164 | ID NO: 101) | Marker |
| | DNA Concentration (ng) Co-Precipitated onto Gold Particles | | | | | | | | | | |
| Ctrl | 20 | 20 | 20 | 45 | 20 | — | — | — | — | 50 | 20 |
| A2+/A1− | 20 | 20 | 20 | 45 | 20 | 30 | — | 30 | — | 50 | 20 |
| A2+/A3− | 20 | 20 | 20 | 45 | 20 | 30 | — | — | 30 | 50 | 20 |
| A4+/A1− | 20 | 20 | 20 | 45 | 20 | — | 30 | 30 | — | 50 | 20 |
| A4+/A3− | 20 | 20 | 20 | 45 | 20 | — | 30 | — | 30 | 50 | 20 |

[0649] DNA cleavage can also be monitored using an immunofluorescent assay. For this, the gene encoding the Ds-Red Express fluorescent protein (SEQ ID NO:107) may be partially duplicated and a cascade target sequence can be incorporated between the duplicated fragments (FIG. 17A). To boost expression, the 5 prime end of the partially duplicated DsRed gene is operably linked to the cauliflower mosaic virus 35S (CAMV35S) enhancer (SEQ ID NO:127) and Maize Histone 2B (H2B) promoter (SEQ ID NO:192) and the 3 prime end fused with the Potato Proteinase Inhibitor II (PINII) terminator (SEQ ID NO:193) resulting in a Ds-target site-sRed reporter construct illustrated in FIG. 17A. With this configuration, cleavage and cellular repair of the target sequence will result in two outcomes. The first outcome is intramolecular DNA repair between the duplicated regions of the Ds-Red gene. This restores the gene resulting in Ds-Red expression and immunofluorescence (FIG. 17B). The second outcome produces indel mutations indicative of DNA target cleavage and repair by the non-homologous end-joining (NHEJ) pathway that can be detected by targeted deep sequencing as described in Karvelis, T. et al. (2015) Genome Biology. 16:253 (Methods Section: in planta mutation detection) (FIG. 17C). When delivered into eukaryotic cells, either DNA repair outcome may be recovered permitting an immunofluorescence visual screen followed by a confirmatory sequencing step to detect DNA target cleavage activity.

[0650] As illustrated in FIG. 18, expression cassettes encoding I-Teel fused to the 5 prime end of the cse1 gene (SEQ ID NOS: 187 and 188) produced Ds-Red immunofluorescent signal, indicative of target cleavage, intramolecular repair, and functional restoration of the Ds-Red gene. Examination of the cascade target sites by deep sequencing yielded small insertion or deletion mutations originating within the cleavage sites of the I-Teel cleavage motif, CNNNG (where N represents any base pair A, T, G, or C), indicative of NHEJ DNA repair further collaborating the fluorescent imaging data (FIGS. 19 and 20). Mutations demonstrative of DNA target cleavage and NHEJ repair were also recovered for DNA expression constructs (SEQ ID NOs: 185 and 186) where the I-TevI cleavage domain was appended to the 5 prime end of the cash gene (FIGS. 21 and 22). U6 polymerase III Sth7710 crRNA transcriptional constructs targeting the Ds-target site-sRed reporter construct were assembled as described in Example 2. Transformation experiments were assembled using particle gun transformation as described in Example 3 expect immature embryos were harvested 2-4 days following transformation. Images were captured using a Nikon Digital Sight Ds-Fi1 camera (Nikon, Japan) and NIS-Elements BR software (version 4.00.07) (Nikon, Japan). Experiments assembled with a Ds-Red reporter that did not contain a cascade target site (Ds:no target site:sRed) served as a negative control. Mutations were detected by Illumina deep sequencing as described above.

[0651] Taken together, data indicate that the Type I-E cascade may be engineered to cleave cellular DNA in eukaryotic cells, particularly plant cells. This feature permits natural cellular DNA repair processes to be harnessed enabling the modification of an organism's genetic code. This includes but is not limited to the introduction of NHEJ mutations, excision of chromosomal DNA fragments comprised of either transgenic or endogenous DNA, editing of the codon composition of native or transgenic genes by homologous recombination repair with a donor DNA repair template(s) (endogenous or exogenously supplied), and the site specific insertion of transgenic or endogenous DNA sequences by homologous recombination repair with a donor DNA repair template (endogenous or exogenously supplied). Thus, enabling Type I-E cascade genome editing.

[0652] Some aspects are listed as follows:

[0653] Aspect 1: A method for forming a CRISPR cascade and guide polynucleotide complex in a eukaryotic cell, comprising providing to said eukaryotic cell: (a) a Cse2 polypeptide, and (b) a guide polynucleotide comprising a variable targeting domain that is substantially complementary to a polynucleotide target sequence in the genome of the eukaryotic cell; and incubating said eukaryotic cell; wherein said Cse1 polypeptide functionally associates with at least one other protein to form a cascade; and wherein the guide polynucleotide and cascade form a complex capable of recognizing and binding to the polynucleotide target sequence in the genome of the eukaryotic cell.

[0654] Aspect 2: A method for forming a CRISPR cascade and guide polynucleotide complex in a eukaryotic cell, comprising providing to said eukaryotic cell: (a) a cse1 polynucleotide, and (b) a guide polynucleotide comprising a variable targeting domain that is substantially complementary to a polynucleotide target sequence in the genome of said eukaryotic cell; and incubating said cell; wherein said cse1 polynucleotide is operably linked to a noncoding regulatory element rendering it capable of expressing a Cse1 polypeptide, and wherein said Cse1 polypeptide functionally associates with at least one other protein to form a cascade; and wherein said cascade and guide polynucleotide form a complex capable of recognizing and binding to a polynucleotide target sequence in the genome of said eukaryotic cell.

[0655] Aspect 3: The method of Aspect 1 or 2, wherein said cascade further comprises a protein selected from the group consisting of: Cse2, Cas7, Cas5, and Cas6.

[0656] Aspect 4: The method of Aspect 1 or 2, wherein said cascade further comprises at least two proteins selected from the group consisting of: Cse2, Cas7, Cas5, and Cas6.

[0657] Aspect 5: The method of Aspect 1 or 2, wherein said cascade further comprises at least three proteins selected from the group consisting of: Cse2, Cas7, Cas5, and Cas6.

[0658] Aspect 6: The method of Aspect 1 or 2, wherein said cascade further comprises Cse2, Cas7, Cas5, and Cas6.

[0659] Aspect 7: The method of any of Aspects 2-6, wherein Cas5 is linked to a heterologous polypeptide, wherein said heterologous polypeptide is capable of a function selected from the group consisting of: transcription repression, transcription modulation, transcription activation, polynucleotide methylation, polynucleotide demethylation, polynucleotide cleavage, polynucleotide nicking, deamination, and a combination thereof.

[0660] Aspect 8: The method of Aspect 7, wherein the heterologous polynucleotide is linked to the C-terminal end of Cas5.

[0661] Aspect 9: The method of Aspect 7, wherein the Cas5 and the heterologous polynucleotide are linked by 10 amino acids.

[0662] Aspect 10: The method of Aspect 2, wherein a polynucleotide selected from the group consisting of: cse2, cas7, cas5, and cas6 is further introduced into said eukaryotic cell.

[0663] Aspect 11: The method of Aspect 2, wherein at least two polynucleotides selected from the group consisting of: cse2, cas7, cas5, and cas6 are further introduced into said eukaryotic cell.

[0664] Aspect 12: The method of Aspect 2, wherein at least three polynucleotides selected from the group consisting of: cse2, cas7, cas5, and cas6 are further introduced into said eukaryotic cell.

[0665] Aspect 13: The method of Aspect 2, wherein cse2, cas7, cas5, and cas6 are further introduced into said eukaryotic cell.

[0666] Aspect 14: The method of any of Aspects 2, 10, 11, 12, or 13, wherein at least one of the components is introduced into said eukaryotic cell via a recombinant DNA construct.

[0667] Aspect 15: The method of any of Aspects 2, 10, 11, 12, or 13, wherein at least one component has been optimized for expression in said eukaryotic cell.

[0668] Aspect 16: The method of Aspect 14, wherein the introduction into said eukaryotic cell is achieved via a method selected from the group consisting of: Agrobacterium-mediated transformation, particle bombardment, and floral dip.

[0669] Aspect 17: Any of the methods of Aspects 1-16, further comprising incubating said eukaryotic cell at a temperature of greater than 28 degrees Celsius.

[0670] Aspect 18: Any of the methods of Aspects 1-16, wherein the eukaryotic cell further comprises a guide polynucleotide comprising a sequence substantially complementary to a sequence within the genome of said eukaryotic cell.

[0671] Aspect 19: Any of the methods of Aspects 1-16, further comprising providing to the eukaryotic cell a guide polynucleotide comprising a sequence substantially complementary to a sequence within the genome of said eukaryotic cell.

[0672] Aspect 20: Any of the methods of Aspects 1-16, wherein said eukaryotic cell comprises an endonuclease.

[0673] Aspect 21: The method of Aspect 20, wherein said endonuclease is Cas3.

[0674] Aspect 22: Any of the methods of Aspects 1-16, further comprising providing to the eukaryotic cell an endonuclease.

[0675] Aspect 23: The method of Aspect 22, wherein said endonuclease is Cas3.

[0676] Aspect 24: The method of any of Aspects 20-23, further comprising nicking or cleaving at least one strand of said polynucleotide target sequence.

[0677] Aspect 25: Any of the methods of Aspects 1-24, wherein said eukaryotic cell is a plant cell.

[0678] Aspect 26: The method of Aspect 25, wherein said plant cell is a monocot plant cell.

[0679] Aspect 27: The method of Aspect 26, wherein said monocot plant cell is obtained or derived from a plant selected from the group consisting of: corn (Zea mays), rice (Oryza sativa), rye (Secale cereale), sorghum (Sorghum bicolor, Sorghum vulgare), millet (e.g., pearl millet (Pennisetum glaucum), proso millet (Panicum miliaceum), foxtail millet (Setaria italica), finger millet (Eleusine coracana)), wheat (Triticum species, for example Triticum aestivum, Triticum monococcum), sugarcane (Saccharum spp.), oats (Avena), barley (Hordeum), switchgrass (Panicum virgatum), pineapple (Ananas comosus), banana (Musa spp.), palm, ornamentals, turfgrasses, and other grasses.

[0680] Aspect 28: The method of Aspect 25, wherein said plant cell is a dicot plant cell.

[0681] Aspect 29: The method of Aspect 28, wherein said dicot plant cell is obtained or derived from a plant selected from the group consisting of: soybean (Glycine max), Brassica species (for example but not limited to: oilseed rape or Canola) (Brassica napus, B. campestris, Brassica rapa, Brassica juncea), alfalfa (Medicago sativa), tobacco (Nicotiana tabacum), Arabidopsis (Arabidopsis thaliana), sunflower (Helianthus annuus), cotton (Gossypium arboreum, Gossypium barbadense), and peanut (Arachis hypogaea), tomato (Solanum lycopersicum), potato (Solanum tuberosum).

[0682] Aspect 30: A eukaryotic cell produced by any of the methods of Aspects 1-29.

[0683] Aspect 31: An organism or tissue derived from the eukaryotic cell of Aspect 30.

[0684] Aspect 32: A progeny of the organism of Aspect 31.

[0685] Aspect 33: A plant derived from the eukaryotic cell of Aspect 30.

[0686] Aspect 34: A progeny of the plant of Aspect 33.

[0687] Aspect 35: Any of the methods of Aspects 1-34, wherein said CRISPR cascade is a Type I-E cascade.

[0688] Aspect 36: Any of the methods of Aspects 1-34, wherein said Cse1 polypeptide or cse1 polynucleotide was derived from a host organism comprising a Type I-E CRISPR system.

[0689] Aspect 37: A method for modifying a polynucleotide target sequence in the genome of a eukaryotic cell, comprising providing to said eukaryotic cell: (a) a Cse1 polypeptide, and (b) a guide polynucleotide comprising a variable targeting domain that is substantially complementary to said polynucleotide target sequence in the genome of said eukaryotic cell; and incubating said cell; wherein said Cse1 polypeptide functionally associates with at least one other protein to form a cascade; wherein the guide polynucleotide and cascade form a complex capable of recognizing and binding to the polynucleotide target sequence in the genome of the eukaryotic cell; and wherein the polynucleotide target sequence is modified by at least one nucleotide addition, substitution, or deletion.

[0690] Aspect 38: A method for modifying a polynucleotide target sequence in the genome of a eukaryotic cell, comprising providing to said eukaryotic cell: (a) a cse1 polynucleotide, and (b) a guide polynucleotide comprising a variable targeting domain that is substantially complementary to said polynucleotide target sequence in the genome of said eukaryotic cell; and incubating said cell; wherein said cse1 polynucleotide is operably linked to a noncoding regulatory element rendering it capable of expressing a Cse1 polypeptide, and wherein said Cse1 polypeptide functionally associates with at least one other protein to form a cascade; wherein said cascade and guide polynucleotide form a complex capable of recognizing and binding to a polynucleotide target sequence in the genome of said eukaryotic cell; and wherein the polynucleotide target sequence is modified by at least one nucleotide addition, substitution, or deletion.

[0691] Aspect 39: The method of Aspect 35 or 38, wherein said cascade further comprises a protein selected from the group consisting of: Cse2, Cas7, Cas5, and Cas6.

[0692] Aspect 40: The method of Aspect 35 or 38, wherein said cascade further comprises at least two proteins selected from the group consisting of: Cse2, Cas7, Cas5, and Cas6.

[0693] Aspect 41: The method of Aspect 35 or 38, wherein said cascade further comprises at least three proteins selected from the group consisting of: Cse2, Cas7, Cas5, and Cas6.

[0694] Aspect 42: The method of Aspect 35 or 38, wherein said cascade further comprises Cse2, Cas7, Cas5, and Cas6.

[0695] Aspect 43: The method of any of Aspects 39-42, wherein Cas5 is linked to a heterologous polypeptide, wherein said heterologous polypeptide is capable of a function selected from the group consisting of: transcription repression, transcription modulation, transcription activation, polynucleotide methylation, polynucleotide demethylation, polynucleotide cleavage, polynucleotide nicking, deamination, and a combination thereof.

[0696] Aspect 44: The method of Aspect 43, wherein the heterologous polynucleotide is linked to the C-terminal end of Cas5.

[0697] Aspect 45: The method of Aspect 43, wherein the Cas5 and the heterologous polynucleotide are linked by 10 amino acids.

[0698] Aspect 46: The method of Aspect 38, wherein a polynucleotide selected from the group consisting of: cse2, cas7, cas5, and cas6 is further introduced into said eukaryotic cell.

[0699] Aspect 47: The method of Aspect 38, wherein at least two polynucleotides selected from the group consisting of: cse2, cas7, cas5, and cas6 are further introduced into said eukaryotic cell.

[0700] Aspect 48: The method of Aspect 38, wherein at least three polynucleotides selected from the group consisting of: cse2, cas7, cas5, and cas6 are further introduced into said eukaryotic cell.

[0701] Aspect 49: The method of Aspect 38, wherein cse2, cas7, cas5, and cas6 are further introduced into said eukaryotic cell.

[0702] Aspect 50: The method of any of Aspects 38, 46, 47, 48, or 49, wherein at least one of the components is introduced into said eukaryotic cell via a recombinant DNA construct.

[0703] Aspect 51: The method of any of Aspects 38, 46, 47, 48, or 49, wherein at least one of the components has been optimized for expression in said eukaryotic cell.

[0704] Aspect 52: The method of Aspect 50, wherein the introduction into said eukaryotic cell is achieved via a method selected from the group consisting of: Agrobacterium-mediated transformation, particle bombardment, and floral dip.

[0705] Aspect 53: Any of the methods of Aspects 35-52, further comprising incubating said eukaryotic cell at a temperature of greater than 28 degrees Celsius.

[0706] Aspect 54: Any of the methods of Aspects 35-52, wherein the eukaryotic cell further comprises a guide polynucleotide comprising a sequence substantially complementary to a sequence within the genome of said eukaryotic cell.

[0707] Aspect 55: Any of the methods of Aspects 35-52, further comprising providing to the eukaryotic cell a guide polynucleotide comprising a sequence substantially complementary to a sequence within the genome of said eukaryotic cell.

[0708] Aspect 56: Any of the methods of Aspects 35-52, wherein said eukaryotic cell comprises an endonuclease.

[0709] Aspect 57: The method of Aspect 20, wherein said endonuclease is Cas3.

[0710] Aspect 58: Any of the methods of Aspects 35-52, further comprising providing to the eukaryotic cell an endonuclease.

[0711] Aspect 59: The method of Aspect 58, wherein said endonuclease is Cas3.

[0712] Aspect 60: The method of any of Aspects 56-59, further comprising nicking or cleaving at least one strand of said polynucleotide target sequence.

[0713] Aspect 61: Any of the methods of Aspects 35-60, wherein said eukaryotic cell is a plant cell.

[0714] Aspect 62: The method of Aspect 61, wherein said plant cell is a monocot plant cell.

[0715] Aspect 63: The method of Aspect 62, wherein said monocot plant cell is obtained or derived from a plant selected from the group consisting of: corn (Zea mays), rice (Oryza sativa), rye (Secale cereale), sorghum (Sorghum bicolor, Sorghum vulgare), millet (e.g., pearl millet (Pennisetum glaucum), proso millet (Panicum miliaceum), foxtail millet (Setaria italica), finger millet (Eleusine coracana)), wheat (Triticum species, for example Triticum aestivum, Triticum monococcum), sugarcane (Saccharum spp.), oats (Avena), barley (Hordeum), switchgrass (Panicum virgatum), pineapple (Ananas comosus), banana (Musa spp.), palm, ornamentals, turfgrasses, and other grasses.

[0716] Aspect 64: The method of Aspect 61, wherein said plant cell is a dicot plant cell.

[0717] Aspect 65: The method of Aspect 64, wherein said dicot plant cell is obtained or derived from a plant selected from the group consisting of: soybean (Glycine max), Brassica species (for example but not limited to: oilseed rape or Canola) (Brassica napus, B. campestris, Brassica rapa, Brassica juncea), alfalfa (Medicago sativa), tobacco (Nicotiana tabacum), Arabidopsis (Arabidopsis thaliana), sunflower (Helianthus annuus), cotton (Gossypium arboreum, Gossypium barbadense), and peanut (Arachis hypogaea), tomato (Solanum lycopersicum), potato (Solanum tuberosum).

[0718] Aspect 66: A eukaryotic cell produced by any of the methods of Aspects 35-65.

[0719] Aspect 67: An organism or tissue derived from the eukaryotic cell of Aspect 66.

[0720] Aspect 68: A progeny of the organism of Aspect 67.

[0721] Aspect 69: A plant derived from the eukaryotic cell of Aspect 66.

[0722] Aspect 70: A progeny of the plant of Aspect 69.

[0723] Aspect 71: Any of the methods of Aspects 37-70, wherein said cascade is a Type I-E CRISPR cascade.

[0724] Aspect 72: Any of the methods of Aspects 37-70, wherein said Cse1 polypeptide or cse1 polynucleotide was derived from a host organism comprising a Type I-E CRISPR system.

[0725] Aspect 73: A method for forming a CRISPR cascade and guide polynucleotide complex in a eukaryotic cell, comprising providing to said eukaryotic cell a guide polynucleotide comprising a variable targeting domain that is substantially complementary to a polynucleotide target sequence in the genome of said eukaryotic cell; wherein said eukaryotic cell comprises a cascade wherein one of the components is encoded by a cse1 polynucleotide; and incubating said cell; wherein the guide polynucleotide and cascade form a complex capable of recognizing and binding to said polynucleotide target sequence in the genome of said eukaryotic cell.

[0726] Aspect 74: A method for forming a CRISPR cascade and guide polynucleotide complex in a eukaryotic cell, comprising providing to said eukaryotic cell a guide polynucleotide comprising a variable targeting domain that is substantially complementary to a polynucleotide target sequence in the genome of said eukaryotic cell; wherein said eukaryotic cell comprises a cascade comprising a Cse1 polypeptide; and incubating said cell; wherein the guide polynucleotide and cascade form a complex capable of recognizing and binding to said polynucleotide target sequence in the genome of said eukaryotic cell.

[0727] Aspect 75: The method of Aspect 71 or 74, wherein said cascade further comprises a protein selected from the group consisting of: Cse2, Cas7, Cas5, and Cas6.

[0728] Aspect 76: The method of Aspect 71 or 74, wherein said cascade further comprises at least two proteins selected from the group consisting of: Cse2, Cas7, Cas5, and Cas6.

[0729] Aspect 77: The method of Aspect 71 or 74, wherein said cascade further comprises at least three proteins selected from the group consisting of: Cse2, Cas7, Cas5, and Cas6.

[0730] Aspect 78: The method of Aspect 71 or 74, wherein said cascade further comprises Cse2, Cas7, Cas5, and Cas6.

[0731] Aspect 79: The method of any of Aspects 75-78, wherein Cas5 is linked to a heterologous polypeptide, wherein said heterologous polypeptide is capable of a function selected from the group consisting of: transcription repression, transcription modulation, transcription activation, polynucleotide methylation, polynucleotide demethylation, polynucleotide cleavage, polynucleotide nicking, deamination, and a combination thereof.

[0732] Aspect 80: The method of Aspect 79, wherein the heterologous polynucleotide is linked to the C-terminal end of Cas5.

[0733] Aspect 81: The method of Aspect 79, wherein the Cas5 and the heterologous polynucleotide are linked by 10 amino acids.

[0734] Aspect 82: The method of Aspect 74, wherein a polynucleotide selected from the group consisting of: cse2, cas7, cas5, and cas6 is further introduced into said eukaryotic cell.

[0735] Aspect 83: The method of Aspect 74, wherein at least two polynucleotides selected from the group consisting of: cse2, cas7, cas5, and cas6 are further introduced into said eukaryotic cell.

[0736] Aspect 84: The method of Aspect 74, wherein at least three polynucleotides selected from the group consisting of: cse2, cas7, cas5, and cas6 are further introduced into said eukaryotic cell.

[0737] Aspect 85: The method of Aspect 74, wherein cse2, cas7, cas5, and cas6 are further introduced into said eukaryotic cell.

[0738] Aspect 86: The method of any of Aspects 74, 82, 83, 84, or 85, wherein at least one of the components is introduced into said eukaryotic cell via a recombinant DNA construct.

[0739] Aspect 87: The method of any of Aspects 74, 82, 83, 84, or 85, wherein at least one of the components has been optimized for expression in said eukaryotic cell.

[0740] Aspect 88: The method of Aspect 86, wherein the introduction into said eukaryotic cell is achieved via a method selected from the group consisting of: Agrobacterium-mediated transformation, particle bombardment, and floral dip.

[0741] Aspect 89: Any of the methods of Aspects 71-88, further comprising incubating said eukaryotic cell at a temperature of greater than 28 degrees Celsius.

[0742] Aspect 90: Any of the methods of Aspects 71-88, wherein the eukaryotic cell further comprises a guide polynucleotide comprising a sequence substantially complementary to a sequence within the genome of said eukaryotic cell.

[0743] Aspect 91: Any of the methods of Aspects 71-88, further comprising providing to the eukaryotic cell a guide polynucleotide comprising a sequence substantially complementary to a sequence within the genome of said eukaryotic cell.

[0744] Aspect 92: Any of the methods of Aspects 71-88, wherein said eukaryotic cell comprises an endonuclease.

[0745] Aspect 93: The method of Aspect 92, wherein said endonuclease is Cas3.

[0746] Aspect 94: Any of the methods of Aspects 71-88, further comprising providing to the eukaryotic cell an endonuclease.

[0747] Aspect 95: The method of Aspect 94, wherein said endonuclease is Cas3.

[0748] Aspect 96: The method of any of Aspects 92-95, further comprising nicking or cleaving at least one strand of said polynucleotide target sequence.

[0749] Aspect 97: Any of the methods of Aspects 71-96, wherein said eukaryotic cell is a plant cell.

[0750] Aspect 98: The method of Aspect 97, wherein said plant cell is a monocot plant cell.

[0751] Aspect 99: The method of Aspect 98, wherein said monocot plant cell is obtained or derived from a plant selected from the group consisting of: corn (Zea mays), rice (Oryza sativa), rye (Secale cereale), sorghum (Sorghum bicolor, Sorghum vulgare), millet (e.g., pearl millet (Pennisetum glaucum), proso millet (Panicum miliaceum), foxtail millet (Setaria italica), finger millet (Eleusine coracana)), wheat (Triticum species, for example Triticum aestivum, Triticum monococcum), sugarcane (Saccharum spp.), oats (Avena), barley (Hordeum), switchgrass (Panicum virgatum), pineapple (Ananas comosus), banana (Musa spp.), palm, ornamentals, turfgrasses, and other grasses.

[0752] Aspect 100: The method of Aspect 97, wherein said plant cell is a dicot plant cell.

[0753] Aspect 101: The method of Aspect 100, wherein said dicot plant cell is obtained or derived from a plant selected from the group consisting of: soybean (Glycine max), Brassica species (for example but not limited to: oilseed rape or Canola) (Brassica napus, B. campestris, Brassica rapa, Brassica juncea), alfalfa (Medicago sativa), tobacco (Nicotiana tabacum), Arabidopsis (Arabidopsis thaliana), sunflower (Helianthus annuus), cotton (Gossypium arboreum, Gossypium barbadense), and peanut (Arachis hypogaea), tomato (Solanum lycopersicum), potato (Solanum tuberosum).

[0754] Aspect 102: A eukaryotic cell produced by any of the methods of Aspects 71-101.

[0755] Aspect 103: An organism or tissue derived from the eukaryotic cell of Aspect 102.

[0756] Aspect 104: A progeny of the organism of Aspect 103.

[0757] Aspect 105: A plant derived from the eukaryotic cell of Aspect 102.

[0758] Aspect 106: A progeny of the plant of Aspect 105.

[0759] Aspect 107: Any of the methods of Aspects 72-106, wherein said CRISPR cascade is a Type I-E cascade.

[0760] Aspect 108: Any of the methods of Aspects 72-106, wherein said CseI polypeptide or cse1 polynucleotide was derived from a host organism comprising a Type I-E CRISPR system.

[0761] Aspect 109: A method for providing a trait of agronomic importance to a plant, comprising: (a) providing to a plant cell a Cse1 polypeptide, an endonuclease, and a guide polynucleotide comprising a variable targeting domain that is substantially complementary to a polynucleotide target sequence in the genome of the plant cell, (b) placing the plant cell in a medium that promotes growth, (c) generating a plant from the plant cell, and (d) screening said plant for a trait of agronomic importance; wherein said Cse1 polypeptide functionally associates with at least one other protein to form a cascade; and wherein the guide polynucleotide and cascade form a complex capable of recognizing and binding to the polynucleotide target sequence in the genome of the plant cell.

[0762] Aspect 110: A method for providing a trait of agronomic importance to a plant, comprising: (a) providing to a plant cell a cse1 polynucleotide, an endonuclease, and a guide polynucleotide comprising a variable targeting domain that is substantially complementary to a polynucleotide target sequence in the genome of the plant cell, (b) placing the plant cell in a medium that promotes growth, (c) generating a plant from the plant cell, and (d) screening said plant for a trait of agronomic importance; wherein said cse1 polynucleotide is operably linked to a noncoding regulatory element rendering it capable of expressing a Cse1 polypeptide, and wherein said Cse1 polypeptide functionally associates with at least one other protein to form a cascade; and wherein said cascade and guide polynucleotide form a complex capable of recognizing and binding to a polynucleotide target sequence in the genome of said eukaryotic cell.

[0763] Aspect 111: The method of Aspect 107 or 110, wherein said cascade further comprises a protein selected from the group consisting of: Cse2, Cas7, Cas5, and Cas6.

[0764] Aspect 112: The method of Aspect 107 or 110, wherein said cascade further comprises at least two proteins selected from the group consisting of: Cse2, Cas7, Cas5, and Cas6.

[0765] Aspect 113: The method of Aspect 107 or 110, wherein said cascade further comprises at least three proteins selected from the group consisting of: Cse2, Cas7, Cas5, and Cas6.

[0766] Aspect 114: The method of Aspect 107 or 110, wherein said cascade further comprises Cse2, Cas7, Cas5, and Cas6.

[0767] Aspect 115: The method of any of Aspects 111-114, wherein Cas5 is linked to a heterologous polypeptide, wherein said heterologous polypeptide is capable of a function selected from the group consisting of: transcription repression, transcription modulation, transcription activation, polynucleotide methylation, polynucleotide demethylation, polynucleotide cleavage, polynucleotide nicking, deamination, and a combination thereof.

[0768] Aspect 116: The method of Aspect 115, wherein the heterologous polynucleotide is linked to the C-terminal end of Cas5.

[0769] Aspect 117: The method of Aspect 115, wherein the Cas5 and the heterologous polynucleotide are linked by 10 amino acids.

[0770] Aspect 118: The method of Aspect 110, wherein a polynucleotide selected from the group consisting of: cse2, cas7, cas5, and cas6 is further introduced into said eukaryotic cell.

[0771] Aspect 119: The method of Aspect 110, wherein at least two polynucleotides selected from the group consisting of: cse2, cas7, cas5, and cas6 are further introduced into said eukaryotic cell.

[0772] Aspect 120: The method of Aspect 110, wherein at least three polynucleotides selected from the group consisting of: cse2, cas7, cas5, and cas6 are further introduced into said eukaryotic cell.

[0773] Aspect 121: The method of Aspect 110, wherein cse2, cas7, cas5, and cas6 are further introduced into said eukaryotic cell.

[0774] Aspect 122: The method of any of Aspects 110, 118, 119, 120, or 121, wherein at least one of the components is introduced into said eukaryotic cell via a recombinant DNA construct.

[0775] Aspect 123: The method of any of Aspects 110, 118, 119, 120, or 121, wherein at least one of the components has been optimized for expression in said eukaryotic cell.

[0776] Aspect 124: The method of Aspect 122, wherein the introduction into said eukaryotic cell is achieved via a method selected from the group consisting of: Agrobacterium-mediated transformation, particle bombardment, and floral dip.

[0777] Aspect 125: Any of the methods of Aspects 107-124, further comprising incubating said eukaryotic cell at a temperature of greater than 28 degrees Celsius.

[0778] Aspect 126: Any of the methods of Aspects 107-124, wherein the eukaryotic cell further comprises a guide polynucleotide comprising a sequence substantially complementary to a sequence within the genome of said eukaryotic cell.

[0779] Aspect 127: Any of the methods of Aspects 107-124, further comprising providing to the eukaryotic cell a guide polynucleotide comprising a sequence substantially complementary to a sequence within the genome of said eukaryotic cell.

[0780] Aspect 128: Any of the methods of Aspects 107-124, wherein said eukaryotic cell comprises an endonuclease.

[0781] Aspect 129: The method of Aspect 128, wherein said endonuclease is Cas3.

[0782] Aspect 130: Any of the methods of Aspects 94-106, further comprising providing to the eukaryotic cell an endonuclease.

[0783] Aspect 131: The method of Aspect 130, wherein said endonuclease is Cas3.

[0784] Aspect 132: The method of any of Aspects 128-131, further comprising nicking or cleaving at least one strand of said polynucleotide target sequence.

[0785] Aspect 133: Any of the methods of Aspects 107-132, wherein said eukaryotic cell is a plant cell.

[0786] Aspect 134: The method of Aspect 133, wherein said plant cell is a monocot plant cell.

[0787] Aspect 135: The method of Aspect 134, wherein said monocot plant cell is obtained or derived from a plant selected from the group consisting of: corn (Zea mays), rice (Oryza sativa), rye (Secale cereale), sorghum (Sorghum bicolor, Sorghum vulgare), millet (e.g., pearl millet (Pennisetum glaucum), proso millet (Panicum miliaceum), foxtail millet (Setaria italica), finger millet (Eleusine coracana)), wheat (Triticum species, for example Triticum aestivum, Triticum monococcum), sugarcane (Saccharum spp.), oats (Avena), barley (Hordeum), switchgrass (Panicum virgatum), pineapple (Ananas comosus), banana (Musa spp.), palm, ornamentals, turfgrasses, and other grasses.

[0788] Aspect 136: The method of Aspect 133, wherein said plant cell is a dicot plant cell.

[0789] Aspect 137: The method of Aspect 136, wherein said dicot plant cell is obtained or derived from a plant selected from the group consisting of: soybean (Glycine max), Brassica species (for example but not limited to: oilseed rape or Canola) (Brassica napus, B. campestris, Brassica rapa, Brassica juncea), alfalfa (Medicago sativa), tobacco (Nicotiana tabacum), Arabidopsis (Arabidopsis thaliana), sunflower (Helianthus annuus), cotton (Gossypium arboreum, Gossypium barbadense), and peanut (Arachis hypogaea), tomato (Solanum lycopersicum), potato (Solanum tuberosum).

[0790] Aspect 138: The method of any of Aspects 107-137, wherein said trait of agronomic importance is selected from the group consisting of: disease resistance, drought tolerance, heat tolerance, cold tolerance, salinity tolerance, metal tolerance, herbicide tolerance, improved water use efficiency, improved nitrogen utilization, improved nitrogen fixation, pest resistance, herbivore resistance, pathogen resistance, yield improvement, health enhancement, vigor improvement, growth improvement, photosynthetic capability improvement, nutrition enhancement, altered protein content, altered oil content, increased biomass, increased shoot length, increased root length, improved root architecture, modulation of a metabolite, modulation of the proteome, increased seed weight, altered seed carbohydrate composition, altered seed oil composition, altered seed protein composition, and altered seed nutrient composition.

[0791] Aspect 139: A eukaryotic cell produced by any of the methods of Aspects 107-138.

[0792] Aspect 140: An organism or tissue derived from the eukaryotic cell of Aspect 139.

[0793] Aspect 141: A progeny of the organism of Aspect 140.

[0794] Aspect 142: A plant derived from the eukaryotic cell of Aspect 139.

[0795] Aspect 143: A progeny of the plant of Aspect 142.

[0796] Aspect 144: Any of the methods of Aspects 111-143, wherein said cascade is a Type I-E CRISPR cascade.

[0797] Aspect 145: Any of the methods of Aspects 111-143, wherein said Cse1 polypeptide or cse1 polynucleotide was derived from a host organism comprising a Type I-E CRISPR system.

[0798] Aspect 146: A synthetic composition comprising: (a) a eukaryotic cell, (b) a guide polynucleotide comprising a variable targeting domain that is substantially complementary to a polynucleotide target sequence in the genome of said eukaryotic cell, (c) an endonuclease, and (d) a cascade comprising a Cse1 polypeptide; wherein said cascade forms a complex with the guide polynucleotide and the endonuclease; and wherein the complex is capable of recognizing, binding to, and nicking or cleaving at least one strand of a polynucleotide target sequence in the genome of said eukaryotic cell.

[0799] Aspect 147: A synthetic composition comprising: (a) a eukaryotic cell, (b) a guide polynucleotide comprising a variable targeting domain that is substantially complementary to a polynucleotide target sequence in the genome of said eukaryotic cell, (c) an endonuclease, and (d) a cse1 polynucleotide; wherein said cse1 polynucleotide is operably linked to a noncoding regulatory element rendering it capable of expressing a Cse1 polypeptide that functionally associates with at least one other protein to form a cascade; wherein said cascade forms a complex with the guide polynucleotide and the endonuclease; and wherein the complex is capable of recognizing, binding to, and nicking or cleaving at least one strand of a polynucleotide target sequence in the genome of said eukaryotic cell.

[0800] Aspect 148: The synthetic composition of Aspect 144 or 147, wherein said cascade further comprises a protein selected from the group consisting of: Cse2, Cas7, Cas5, and Cas6.

[0801] Aspect 149: The synthetic composition of Aspect 144 or 147, wherein said cascade further comprises at least two proteins selected from the group consisting of: Cse2, Cas7, Cas5, and Cas6.

[0802] Aspect 150: The synthetic composition of Aspect 144 or 147, wherein said cascade further comprises at least three proteins selected from the group consisting of: Cse2, Cas7, Cas5, and Cas6.

[0803] Aspect 151: The synthetic composition of Aspect 144 or 147, wherein said cascade further comprises Cse2, Cas7, Cas5, and Cas6.

[0804] Aspect 152: The synthetic composition of any of Aspects 148-151, wherein Cas5 is linked to a heterologous polypeptide, wherein said heterologous polypeptide is capable of a function selected from the group consisting of: transcription repression, transcription modulation, transcription activation, polynucleotide methylation, polynucleotide demethylation, polynucleotide cleavage, polynucleotide nicking, deamination, and a combination thereof.

[0805] Aspect 153: The method of Aspect 152, wherein the heterologous polynucleotide is linked to the C-terminal end of Cas5.

[0806] Aspect 154: The method of Aspect 152, wherein the Cas5 and the heterologous polynucleotide are linked by 10 amino acids.

[0807] Aspect 155: The synthetic composition of Aspect 147, further comprising a polynucleotide selected from the group consisting of: cse2, cas7, cas5, and cas6.

[0808] Aspect 156: The synthetic composition of Aspect 147, further comprising at least two polynucleotides selected from the group consisting of: cse2, cas7, cas5, and cas6.

[0809] Aspect 157: The synthetic composition of Aspect 147, further comprising at least three polynucleotides selected from the group consisting of: cse2, cas7, cas5, and cas6.

[0810] Aspect 158: The synthetic composition of Aspect 147, further comprising cse2, cas7, cas5, and cas6.

[0811] Aspect 159: The synthetic composition of any of Aspects 147, 155, 156, 157, or 158, wherein at least one of the components were introduced into said eukaryotic cell via a recombinant DNA construct.

[0812] Aspect 160: The synthetic composition of any of Aspects 147, 155, 156, 157, or 158, wherein at least one of the components has been optimized for expression in said eukaryotic cell.

[0813] Aspect 161: The synthetic composition of Aspect 159, wherein the introduction into said eukaryotic cell is achieved via a method selected from the group consisting of: Agrobacterium-mediated transformation, particle bombardment, and floral dip.

[0814] Aspect 162: Any of the synthetic compositions of Aspects 144-161, wherein said eukaryotic cell is incubated at a temperature of greater than 28 degrees Celsius.

[0815] Aspect 163: Any of the synthetic compositions of Aspects 144-161, wherein the eukaryotic cell further comprises a guide polynucleotide comprising a sequence substantially complementary to a sequence within the genome of said eukaryotic cell.

[0816] Aspect 164: Any of the synthetic compositions of Aspects 144-161, wherein said eukaryotic cell further comprises an endonuclease.

[0817] Aspect 165: The synthetic composition of Aspect 164, wherein said endonuclease is Cas3.

[0818] Aspect 166: Any of the synthetic compositions of Aspects 144-161, further comprising an endonuclease.

[0819] Aspect 167: The synthetic composition of Aspect 166, wherein said endonuclease is Cas3.

[0820] Aspect 168: Any of the synthetic compositions of Aspects 144-161, wherein said eukaryotic cell is a plant cell.

[0821] Aspect 169: The synthetic composition of Aspect 168, wherein said plant cell is a monocot plant cell.

[0822] Aspect 170: The synthetic composition of Aspect 169, wherein said monocot plant cell is obtained or derived from a plant selected from the group consisting of: corn (Zea mays), rice (Oryza sativa), rye (Secale cereale), sorghum (Sorghum bicolor, Sorghum vulgare), millet (e.g., pearl millet (Pennisetum glaucum), proso millet (Panicum miliaceum), foxtail millet (Setaria italica), finger millet (Eleusine coracana)), wheat (Triticum species, for example Triticum aestivum, Triticum monococcum), sugarcane (Saccharum spp.), oats (Avena), barley (Hordeum), switchgrass (Panicum virgatum), pineapple (Ananas comosus), banana (Musa spp.), palm, ornamentals, turfgrasses, and other grasses.

[0823] Aspect 171: The synthetic composition of Aspect 168, wherein said plant cell is a dicot plant cell.

[0824] Aspect 172: The synthetic composition of Aspect 171, wherein said dicot plant cell is obtained or derived from a plant selected from the group consisting of: soybean (Glycine max), Brassica species (for example but not limited to: oilseed rape or Canola) (Brassica napus, B. campestris, Brassica rapa, Brassica juncea), alfalfa (Medicago sativa), tobacco (Nicotiana tabacum), Arabidopsis (Arabidopsis thaliana), sunflower (Helianthus annuus), cotton (Gossypium arboreum, Gossypium barbadense), and peanut (Arachis hypogaea), tomato (Solanum lycopersicum), potato (Solanum tuberosum).

[0825] Aspect 173: A eukaryotic cell produced by any of the synthetic compositions of Aspects 144-172.

[0826] Aspect 174: An organism or tissue derived from the eukaryotic cell of Aspect 173.

[0827] Aspect 175: A progeny of the organism of Aspect 174.

[0828] Aspect 176: A plant derived from the eukaryotic cell of Aspect 173.

[0829] Aspect 177: A progeny of the plant of Aspect 176.

[0830] Aspect 178: Any of the synthetic compositions of Aspects 136-177, wherein said cascade is a Type I-E CRISPR cascade.

[0831] Aspect 179: Any of the synthetic of Aspects 136-177, wherein said Cse1 polypeptide or cse1 polynucleotide was derived from a host organism comprising a Type I-E CRISPR system.

[0832] Aspect 180: A synthetic composition comprising a Cas5 protein and a heterologous polypeptide, wherein said heterologous polypeptide is capable of a function selected from the group consisting of: transcription repression, transcription modulation, transcription activation, polynucleotide methylation, polynucleotide demethylation, polynucleotide cleavage, polynucleotide nicking, deamination, and a combination thereof

[0833] Aspect 181: The synthetic composition of Aspect 178, wherein said Cas5 protein and said heterologous polynucleotide are linked by a sequence of 10 amino acids.

We claim:

1. A method for modifying a polynucleotide sequence of a target site in the genome of a plant cell, comprising providing to the plant cell the following molecules:
(a) a Cascade comprising at least one component selected from the group consisting of: Cse1, Cse2, Cas5, Cash, and Cas7;
(b) a molecule capable of nicking, cleaving, or editing at least one nucleotide of the polynucleotide sequence of the target site; and
(c) a guide polynucleotide comprising a variable targeting domain that is substantially complementary to the polynucleotide target sequence in the genome of said eukaryotic cell; and
wherein the guide polynucleotide and Cascade form a complex capable of recognizing and binding to the polynucleotide sequence of the target site; and wherein the polynucleotide sequence of the target site is modified by the addition at least one nucleotide, the substitution of at least one nucleotide, the deletion of at least one nucleotide, the chemical alteration of at least one nucleotide, or any combination of the preceding.

2. The method of claim 1, wherein the molecule of (b) is a Cas3 nuclease.

3. The method of claim 1, wherein the molecule of (b) is Fok1.

4. The method of claim 1, wherein the molecule of (b) is I-TevI.

5. The method of claim 1, wherein the molecule of (b) is an engineered Cas3 nickase.

6. The method of claim 5, wherein nicking occurs on both strands of a double-stranded polynucleotide to create a double-strand break.

7. The method of claim 1, wherein at least one of the components of (a) is a fusion protein further comprising a transcriptional activator.

8. The method of claim 1, wherein a plurality of components of (a) each further comprise a transcriptional activator.

9. The method of claim 1, wherein the molecule of (b) is a nuclease domain that is fused to at least one of the components of (a).

10. The method of claim 9, wherein the nuclease domain is I-TevI.

11. The method of claim 9, wherein the nuclease domain is Fok1.

12. The method of claim 1, wherein the target sequence is an endogenous gene of the cell.

13. The method of claim 1, wherein the target sequence is heterologous to the cell.

14. The method of claim 1, further comprising providing to the cell a heterologous polynucleotide.

15. The method of claim 14, wherein the heterologous polynucleotide is a DNA repair template, and wherein the polynucleotide sequence of the target site is modified to include at least one base pair alteration as compared to its native state.

16. The method of claim 14, wherein the heterologous polynucleotide is a donor DNA molecule, and wherein the polynucleotide sequence of the target site is modified by the incorporation of the heterologous polynucleotide.

17. The method of claim 1, wherein at least one component of the Cascade in (a) is provided as a polynucleotide sequence in a recombinant construct encoding the polypeptide component.

18. The method of claim 1, wherein at least one component of the Cascade in (a) is provided as a polypeptide.

19. The method of claim 1, wherein the components of the Cascade in (a) and the molecule of (b) are provided as polynucleotides in one or more recombinant constructs.

20. The method of claim 1, wherein the guide polynucleotide of (c) is provided as a DNA molecule that is operably linked to a heterologous regulatory element.

21. The method of claim 20, wherein the heterologous regulatory element is a polII promoter or a polIII promoter.

22. The method of claim 1, wherein the guide polynucleotide of (c) is provided as a polyribonucleotide molecule, optionally further comprising at least one deoxyribonucleotide.

23. The method of claim 1, wherein at least one of the molecules provided to the cell is provided via Agrobacterium-mediated transformation.

24. The method of claim 1, wherein at least one of the molecules provided to the cell is provided via particle bombardment.

25. The method of claim 1, wherein the modification of the polynucleotide sequence of the target site results in transcriptional activation of a gene.

26. The method of claim 1, further comprising placing the plant cell in a medium that promotes viability, and screening the cell for the presence or absence of a trait of interest.

27. The method of claim 1, further comprising placing the plant cell in a medium that promotes growth, generating a plant from the plant cell, and screening the plant for the presence or absence of a trait of agronomic interest.

28. The method of claim 1, wherein the plant cell is obtained or derived from a plant selected from the group consisting of: corn (Zea mays), rice (Oryza sativa), rye (Secale cereale), sorghum (Sorghum bicolor, Sorghum vulgare), millet (e.g., pearl millet (Pennisetum glaucum), proso millet (Panicum miliaceum), foxtail millet (Setaria italica), finger millet (Eleusine coracana)), wheat (Triticum species, for example Triticum aestivum, Triticum monococcum), sugarcane (Saccharum spp.), oats (Avena), barley (Hordeum), switchgrass (Panicum virgatum), pineapple (Ananas comosus), banana (Musa spp.), palm, ornamentals, turfgrass, other grass, soybean (Glycine max), Brassica species (for example but not limited to: oilseed rape or Canola) (Brassica napus, B. campestris, Brassica rapa, Brassica juncea), alfalfa (Medicago sativa), tobacco (Nicotiana tabacum), Arabidopsis (Arabidopsis thaliana), sunflower (Helianthus annuus), cotton (Gossypium arboreum, Gossypium barbadense), and peanut (Arachis hypogaea), tomato (Solanum lycopersicum), and potato (Solanum tuberosum).

29. A synthetic composition comprising:
(a) a plant cell;
(b) Cse1, Cse2, Cas5, Cash, Cas7;
(c) a molecule capable of nicking or cleaving a polynucleotide sequence of a target site in the plant cell; and
(d) a guide polynucleotide comprising a variable targeting domain that is substantially complementary to a polynucleotide target sequence in the plant cell.

30. The method of claim 29, wherein the molecule of 29(c) is a Cas3 nuclease,

31. The method of claim 29, wherein the molecule of 29(c) is Fok1.

32. The method of claim 29, wherein the molecule of 29(c) is I-TevI.

33. The method of claim 29, wherein the molecule of 29(c) is an engineered Cas3 nickase.

34. The method of claim 29, wherein at least one of the components of 29(b) is a fusion protein further comprising a transcriptional activator.

35. The method of claim 29, wherein a plurality of components of 29(b) each further comprise a transcriptional activator.

36. The method of claim 29, wherein the molecule of 29(c) is a nuclease domain that is fused to at least one of the components of 29(b).

37. The synthetic composition of claim 29, wherein at least one of the members of 29(b) further comprises a heterologous nuclease domain or a transcriptional activator.

38. The method of claim 29 further comprising a heterologous polynucleotide.

39. The method of claim 38, wherein the heterologous polynucleotide is a DNA repair template, and wherein the polynucleotide sequence of the target site is modified to include at least one base pair alteration as compared to its native state.

40. The method of claim 38, wherein the heterologous polynucleotide is a donor DNA molecule, and wherein the polynucleotide sequence of the target site is modified by the incorporation of the heterologous polynucleotide.

41. The synthetic composition of claim 29, wherein the plant cell is obtained or derived from a plant selected from the group consisting of: corn (Zea mays), rice (Oryza sativa), rye (Secale cereale), sorghum (Sorghum bicolor, Sorghum vulgare), millet (e.g., pearl millet (Pennisetum glaucum), proso millet (Panicum miliaceum), foxtail millet (Setaria italica), finger millet (Eleusine coracana)), wheat (Triticum species, for example Triticum aestivum, Triticum monococcum), sugarcane (Saccharum spp.), oats (Avena), barley (Hordeum), switchgrass (Panicum virgatum), pineapple (Ananas comosus), banana (Musa spp.), palm, ornamentals, turfgrasses, other grass, soybean (Glycine max), Brassica species (for example but not limited to: oilseed rape or Canola) (Brassica napus, B. campestris, Brassica rapa, Brassica juncea), alfalfa (Medicago sativa), tobacco (Nicotiana tabacum), Arabidopsis (Arabidopsis thaliana), sunflower (Helianthus annuus), cotton (Gossypium arboreum, Gossypium barbadense), and peanut (Arachis hypogaea), tomato (Solanum lycopersicum), and potato (Solanum tuberosum).

42. A method for modifying a polynucleotide sequence of a target site in the genome of a plant cell, comprising providing to the plant cell the following molecules:
(a) a Cascade comprising Cse1, Cse2, Cas5, Cas6, and Cas7;
(b) a Cas3 nickase; and
(c) a guide polynucleotide comprising a variable targeting domain that is substantially complementary to said polynucleotide target sequence in the genome of said plant cell; and
wherein the guide polynucleotide and Cascade form a complex capable of recognizing and binding to the polynucleotide sequence of the target site; and wherein the polynucleotide sequence of the target site is modified by the addition at least one nucleotide, the substitution of at least one nucleotide, the deletion of at least one nucleotide, the chemical alteration of at least one nucleotide, or any combination of the preceding.

43. A method for modifying a polynucleotide sequence of a target site in the genome of a plant cell, comprising providing to the plant cell the following molecules:
(d) a Cascade comprising Cse1, Cse2, Cas5, Cas6, and Cas7;
(e) I-TeVI; and
(f) a guide polynucleotide comprising a variable targeting domain that is substantially complementary to said polynucleotide target sequence in the genome of said plant cell; and
wherein the guide polynucleotide and Cascade form a complex capable of recognizing and binding to the polynucleotide sequence of the target site; and wherein the polynucleotide sequence of the target site is modified by the addition at least one nucleotide, the substitution of at least one nucleotide, the deletion of at least one nucleotide, the chemical alteration of at least one nucleotide, or any combination of the preceding.

44. A method for modifying a polynucleotide sequence of a target site in the genome of a plant cell, comprising providing to the plant cell the following molecules:
(g) Cascade genes cse1, cse2, cas5, cas6, and cas7;
(h) a gene encoding a Cas3 nickase; and
(i) a guide polynucleotide comprising a variable targeting domain that is substantially complementary to said polynucleotide target sequence in the genome of said plant cell; and
wherein the guide polynucleotide and Cascade form a complex capable of recognizing and binding to the polynucleotide sequence of the target site; and wherein the polynucleotide sequence of the target site is modified by the addition at least one nucleotide, the substitution of at least one nucleotide, the deletion of at least one nucleotide, the chemical alteration of at least one nucleotide, or any combination of the preceding.

45. A method for modifying a polynucleotide sequence of a target site in the genome of a plant cell, comprising providing to the plant cell the following molecules:
Cascade genes cse1, cse2, cas5, cas6, and cas7;
(k) a gene encoding I-TevI; and
(l) a guide polynucleotide comprising a variable targeting domain that is substantially complementary to said polynucleotide target sequence in the genome of said plant cell; and
wherein the guide polynucleotide and Cascade form a complex capable of recognizing and binding to the polynucleotide sequence of the target site; and wherein the polynucleotide sequence of the target site is modified by the addition at least one nucleotide, the substitution of at least one nucleotide, the deletion of at least one nucleotide, the chemical alteration of at least one nucleotide, or any combination of the preceding.

The application's sequence listing, which the Patent Office published only in electronic form, follows.

SEQUENCE LISTING (296 sequences)

SEQ ID NO: 1 - DNA, 28 bp, Streptococcus thermophilus
gtttttcccgcacacgcgggggtgatcc

SEQ ID NO: 2 - DNA, 735 bp, Streptococcus thermophilus
gtgaatgctatgaagacgatattgttgaaatttgctggccccttacaatcatggggaacgagttcacattttgaaactaggcatacagatttttatccttccaaaagtgcggtaattggactacttgctgctagtttaggttataggagagacgaagatgaaaaaattcaaaaattaaatgaacttgattttgctgttcgtgtcgatcagcaaggaaatctgttaagagacttccatgttgcacagaagtatacagaaaagggtaaatttgatagaaattatgttacgaatcggtattatctagaagacgctgtatttgttgtagccctctcccatacagatgatagctttatagatatcattaaaggtgctctaaaaaatccctatttccaaccttttatggggagaagggcactcccaataactgcagactttatcttaggtgagacagatgttaatccattagagagcctaaaatcgctgaaatggcaagcttctctatggtttatgaaaaaatctcatgataaggatgctatttctttggaagtttatctagatagtcaattagtcaacaaggatgtttatcagctgaggcaagattatgttaggtcattttcacaaaaagggagaagatttggttttaggtatgaagtacgtgaattaatcagtgttcaaaatcctcactatttaaataagaatacagagcataacattttcgagagtataggagattga

SEQ ID NO: 3 - DNA, 639 bp, Streptococcus thermophilus
atgtacatttctagggtagaaattgatcgatataatagacgaaaggttagagatttaacgcatgtaggagcttatcatgcttgggtggaagagagttttccatcggaattagagcaatcaatccgtacaagaaaattatggcgaatcgatcgtattcaaggtaaggattatcttattattgtaagtaaagaaaaacctaatttacaaaaacttgaaaaatatggtgttgtaggaagcgctcaaactaaggactatcaacattttttagatagcatcaaaactggttttcgaatgaattttagaatagtgctaaatccggttatttcaattacttcacccgataaatcaaaacgaggagttgtaaaaccgcatgtgacgattaaacatcagatggactttctagtgaaacaatctgagaaaaatggcttctcattagtaggagaaagtttctcaattgttgaacgtggttatgaagtttttcagaaaccagaaaaacccatacgactatcaaaagttgtttacgaaggaaccttaactgttagtgatgatacgcttttcaaaaaaatgctgaccgagggagttggaaagaaaaaagcatatggttttggcttgatgacagtggtaccacttgaggaatga

SEQ ID NO: 4 - DNA, 1068 bp, Streptococcus thermophilus
atgacaactgaacaacgattatttttagatattcatgctattcaaagcttaccaccttcaaatatgaatagagatgatacaggtagcccgaaaacagctcagtatggaggagttagaagatctcgcgtaagttctcaagcatggaagaaagcgatgagagagtattttaatactcatggtgatcattcaaatgttggtattagaacaaaagaaattgtgagatatgttgcagataaaatagtagaactagatagttctatcagtattgaagatgctttggaaaaagccgataaagtcttgatagctgctggaatcaagaaaaaaggtgaagttaaagcactttattttatgggtgatagtcaagctaagaagttagctcaagcagcctatgacaatataacacataaaaaagagcttcaaaagttggctaatgaagatccagctattgatattgccctgtttggtcgaatggtagccgaagatccaactcttaacgaggattcttcttctcaggttgcacatgccatttccacacatccagtacaaactgaatttgatttctttacggctgttgatgatttagctccagaggataatgcaggggcgggtatgcttggaactgttgagtttaattcttctacactatatcgctatgcaaatgttgcgattcatgaattgtcaaaacaattaggaaacaaggaatcgttggagaatagtttatctttgttcattgaggcttttgcaaagtcacttccaacagggaaagtaaatacatttgctaatcaaacgctaccacagactttaattgtaacggttcgaagtgatcgtccggttaatcttgtcagtgcatttgaagaaccagttaaatcaatagaaggctatgttactaaatctatcgataaactcgccaaagagtttattaaggttgagaaatttgtagacaaaccacttatgaccttctatgttactttgcatgagagcgacagtctaaaacaaattggggaggaaaaagattcagtttcaaaattattggaagatttttcagaaatgatagcccaatatatttaa

SEQ ID NO: 5 - DNA, 1668 bp, Streptococcus thermophilus
atgagtcggtttaatttacttgatgaaccctggatttctgttatttatgacgagaaaggatccacaaaagatgtttctttacaggatttatttacaaatgctcatcagtataaagaattagcaggagatacgaaaacacaagattttgcggtattacgagtattgttggctgttttgcatacagttttttcccgatttgatatagatggaaatgcttatgagtatcttactattgatgaaggatggaatcagcttgaaccagtggatgagatggatattgagaattatgaagaagctctttatgaaacatgggaaaaactttggactaataaaagatttccaaatattgttaatcaatacttagaaaaatggcgagatcgcttttacttatttgaccaaaagtatccattttttcaggtaacgaaagaagatattgctggagataaaattagcaaagccaaaggaactagtattttgggtaaaaatataaatagaattatatctgagagtggaaataagatagctttattttccccaaaagatgaagaaaataaaaatactctaactgccgcagaattagctagatggctaattacatttcaagggtattcaggagtatccgataaggtcatttttggaaatgaaaaatatacaccttcgaaaggatggctatttgatattggtgctatttatattaaaggtaacactttattcgaaacgttgttactaaattatatttcaccgtataatgaatgtggtaatgtagaaaatattcagcgaccttgctgggaacgtaaaagttctgatatcattaaaagttaccttgatgaaaaagatattaccaatatagctagtttatatactgtttggagtaaaggaatctatattgacccagactttaatttaaataaacctttctcttttgatattgtgaaattacctgatatcaatcatagggataattttttggagccaatgacactttggaagtataatgtttcgggtaaaaatagggatagctatacaccaaagaaacatcttttgaatcagtctttatggcgatcttttggcttgttatctataaaagatactgatcttcaacatagaaaacctggcgttatcgaatggcttacatatattgatgatataataggaaatcgactatcaaacattgttgcaattagtatgcaggacgatggaaaccctcaatcacggcttccaacggatgaggttattgactcaatttttatcaatgatttggttttaacggatttagacgagggtggttgggttcctcgtatcaatgaagtagtagaagaaacaaaaaaaattatttctagaacatataaaacgtatattaatgatataaaggaaatcagaaatatctctaatggtagttatactcagcagatagttgaaagtctatatttcaaaatcgatcaacctttccgacaatggttagctagcattcaaccagaagatgataaagattctaagatacaagaatggagagttttactgaagaaaatagttaaagctgaagcagaagttattttacatcaagggggggcgagggattatcttggtatccaaaaagatgggcgaattaagaatattgcaactgcctataattcgttcgatttttggcttcgtcaacagttaaaatag

SEQ ID NO: 6 - DNA, 594 bp, Streptococcus thermophilus
atgtcacaacatactaaacaaacagtttggactgttacaaagaagattattttcaaattgagtaaccaaaaagaggaaacatatgataaagctacactagcaaaagttagaaaaacattggggaaacccttgagtgaagcaacagaaatatggccaattctgttcgaaaatttaccagaggaatttttaagttcgtatcagcaaccaagctatgaggaattagctatttatacagcgcttcaattgtatgcattgcatcagcaaggtgtttcaacaagtgtgatgctagatgattctaagccctatgaaaatataggttctgcacttggtaagcttaggaaagaagatgataccacttcaattgatagacgattcaataccatgattacctcatcaacgtttgaagaacttacttatcatttaaggcatttgatttcgctacttaaagtggagtcaccggtgattcaggttgattactctggcctagcaaatgatttatattggtttttaaataatagtcaagaaaatgtccgcctaaattgggcaagagcatattataaacaaattaaaggagaaaaaaacaatgacaactga

SEQ ID NO: 7 - DNA, 2781 bp, Streptococcus thermophilus
atgaaacatattaatgattatttttgggctaagaaaacagaggaaaatagtagacttctttggttaccattaactcaacacttagaagacacgaaaaatattgcaggcctcttatgggaacattggttaagtgaaggacaaaaggtattaattgaaaattctattaatgttaaatcaaatattgaaaaccaagggaaaagattggcacaattcctaggagctgttcatgatatcggtaaagcaacaccagcttttcagacgcaaaaaggttatgcaaattcagtagatttggatattcaattgttagaaaaattggaacgcgcaggtttttctggcattagttctctccaactagcctcccccaaaaagagtcatcatagcattgcaggtcaatatttgttatcccattatggcgtggacgaagatattgcaacaattattggtggacaccatggacgaccagttgatgatttagacggtttaaattctcaaaaaagctatccctccaattattaccaggatgaaaagaaagatagtctcgtttatcagaaatggaagtcaaatcaagaagcttttttaaactgggctttaacagaaacagggtttaattctgtgtctcagcttccaaaaatcaaacagcctgctcaagttattctatcaggtttactcataatgtctgactggattgctagtaatgagcatttttttcctttgttaagtttggatgaaactgatgtgaaaaacaagagtcaacgtattgaaactgggtttaaaaagtggaaaaaatctaacttgtggcaacctgaaactttcgttgaccttgttactctttatcaggaaagatttggatttagtccacgaaattttcagctgatactctcacaaacaatcgaaaagacgactaatcctgggatagtgatactggaagcgccaatgggaatcgggaaaacagaggcggctctagcggtatcagagcagttatctagtaaaaaaggatgtagtggattgttttttggattgcccacacaagcaacctccaatggaatttttaagaggattgaacagtggacagagaatataaagggtaacaattctgatcatttttccattcagctggttcatggaaaagcagccttaaatacggattttattgagttacttaaaggaaatacaattaatatggacgactcggaaaacggcagtatttttgtcaatgagtggttttctgggagaaaaacttcagcattagatgattttgtagttgggacggtcgaccaatttttaatggtggctttaaaacaaaaacatttggccttacgtcatttaggatttagtaaaaaagttatcgttattgatgaagtccacgcttatgatgcttatatgagccaatatttgttggaagctatcagatggatgggagcttatggtgttcctgtaattattttatcagcaactttacctgcccaacaaagagaaaaactcataaaaagctatatggctggaatgggagtgaaatggcgagatattgaaaatatagatcagataaaaatagacgcataccctttaatcacttataatgacgggcctgacattcatcaagttaaaatgttcgaaaagcaagaacaaaaaaatatctacattcatcgtttaccagaagaacagttatttgatattgtaaaagaaggtcttgacaatggtggagtagttgggataattgtcaatacggtgagaaaatctcaagaattggcaagaaatttttcagatatttttggagatgatatggtagatttgcttcattctaatttcatagcaactgaaagaatccgaaaagaaaaggatttattgcaagaaattgggaaaaaagcaatacgtccaccaaagaaaatcattattggtacacaggtgcttgaacagtcgttagatattgattttgatgtactgataagcgacttagcgcctatggatttactcattcaacgtatcggacgactacatcgtcacaaaatcaaaaggccccaaaagcacgaagtagcaagattttatgttttaggaacatttgaagagtttgattttgatgaaggaacgcgtttggtttatggggactacctattagctagaactcagtactttttaccagataaaatacgacttcctgatgatatttcaccgctagtccaaaaggtttataattcagacctaacaattacgtttccaaagccagaacttcataaaaaatatttggatgctaaaatagaacatgatgataagattaaaaataaagaaacaaaggcaaagtcataccgtattgctaatcctgtcttaaaaaaatcgagagttcgaactaacagtttgattggttggttaaagaacctccatccaaatgatagtgaagaaaaagcatatgctcaagttcgagatattgaagatacagttgaagtgattgcattaaaaaaaatatctgatgggtatggtttgttcatagaaaataaagatatatctcagaacattactgatcctataattgcaaaaaaggtagcacaaaatactttacgacttccgatgagtttatccaaagcctataatattgatcaaacgattaatgagcttgaaagatataacaatagccacttaagtcaatggcaaaactcatcatggttaaagggatctcttgggattatttttgataaaaacaatgagtttatactgaatggatttaaactattatatgatgaaaaatatggtgttaccatagaaaggttggataagaatgagtcggtttaa

SEQ ID NO: 8 - DNA, 942 bp, Streptococcus thermophilus
atggtagaaaaaaatggagctaagaaaacttctttgagagaactacctaaaattagcgatcgtgttagttttatttacgttgaacatgctaaaataaatcgtgttgatagtgcaatcacagttctggatagtagaggaacagttcgaatacctgctgctatgattggtgtattgttattaggaccaggtaccgatattagtcatagagctgtagaattgattggagatactggaaccagtatggtttgggttggcgagcgtggtgttcgtcaatatgcacatgggagatctttggcacactcaacaaaatttttagagaaacaagcaaaacttgtctcaaattctcgattacgtttagcggttgcacgtaagatgtatcaaatgagatttccagatgaagatgtatctgcgatgactatgcaacaactacgtggacgggaaggagcaagagttcgaagagtctatcggttgcaatctgaaaaatatcaagtttcttggactaaaagagagtacaatcctgatgattttgaaggtggtgatattgttaatcaagctttgtcagctgccaatgtagctttgtatggactagtacatagtatagtaattgcattaggagcttcaccaggtttaggatttgtacatacgggccatgatttatcttttatatacgacatagctgatttatataaagctgaattaacgattccgttggcgtttgaaatcgcagctaattttactgaaattgatgatattggaaagattgctcgtcagaaggttagagattcctttgttgatggtaaattaatagttcgaattgtacaggatattcaatatttatttgatcttgacgatgatgaagaactacttgtcgatactctatctttatgggatgacaaagatatgcttgtaaaacatggtgttagctacaaggaggagctgtga

SEQ ID NO: 9 - DNA, 906 bp, Streptococcus thermophilus
atgccctttacagtagtgacattaaaaagtgtacctccatctcttaggggggatctcactaaatggatgcaagagattgctataggagtttacgtcggtaattttaattctaggattcgagagaaattatggaatagaattcaggcaaatgttggtgaaggagaggcgactattagttattactatcgtaacgagattggttatcagtttgatatgataaattcccaaaaatctgtggtagattttgatggtattccactagtattaatacctaactcaaagacatcttcagaaaattatcctaaattaggatatagtaacgctgcgaagtctcgtaaaataaaacgatattctagttacagaggaccacaagctaactctttaaaaccttatgttgttattgatatcgaaactgatggcctagacgagaaaaagaatacaatcattgagattggagctgtcaagtttaatggacaacaagtagaggaatttaatgctttgattaagtatgaggagaaattacctcctacaatttttaaattgacaggtatttctaaatccttattagatcaagaaggacgtgatttaaaagaagtactttctgaattcttattgtttattggtgatttaactttagttggctataatatccattttgatattcagtttatcaataataaactgaataaatttggtttacccttattaataaataaaactcatgatataatgagatatgtcaaggatgagaagttattcttggataattatcaattgcagactgccctaaagtcatatggaatcgaggattcagttcctcatagagctttgaaagatgctagactaatctatcatttatcaactaaagtaaataaattcttagctagaatgaaagaaaagtcttaa

SEQ ID NO: 10 - protein, 244 aa, Streptococcus thermophilus
MNAMKTILLKFAGPLQSWGTSSHFETRHTDFYPSKSAVIGLLAASLGYRRDEDEKIQKLNELDFAVRVDQQGNLLRDFHVAQKYTEKGKFDRNYVTNRYYLEDAVFVVALSHTDDSFIDIIKGALKNPYFQPFMGRRALPITADFILGETDVNPLESLKSLKWQASLWFMKKSHDKDAISLEVYLDSQLVNKDVYQLRQDYVRSFSQKGRRFGFRYEVRELISVQNPHYLNKNTEHNIFESIGD

SEQ ID NO: 11 - protein, 212 aa, Streptococcus thermophilus
MYISRVEIDRYNRRKVRDLTHVGAYHAWVEESFPSELEQSIRTRKLWRIDRIQGKDYLIIVSKEKPNLQKLEKYGVVGSAQTKDYQHFLDSIKTGFRMNFRIVLNPVISITSPDKSKRGVVKPHVTIKHQMDFLVKQSEKNGFSLVGESFSIVERGYEVFQKPEKPIRLSKVVYEGTLTVSDDTLFKKMLTEGVGKKKAYGFGLMTVVPLEE

SEQ ID NO: 12 - protein, 355 aa, Streptococcus thermophilus
MTTEQRLFLDIHAIQSLPPSNMNRDDTGSPKTAQYGGVRRSRVSSQAWKKAMREYFNTHGDHSNVGIRTKEIVRYVADKIVELDSSISIEDALEKADKVLIAAGIKKKGEVKALYFMGDSQAKKLAQAAYDNITHKKELQKLANEDPAIDIALFGRMVAEDPTLNEDSSSQVAHAISTHPVQTEFDFFTAVDDLAPEDNAGAGMLGTVEFNSSTLYRYANVAIHELSKQLGNKESLENSLSLFIEAFAKSLPTGKVNTFANQTLPQTLIVTVRSDRPVNLVSAFEEPVKSIEGYVTKSIDKLAKEFIKVEKFVDKPLMTFYVTLHESDSLKQIGEEKDSVSKLLEDFSEMIAQYI

SEQ ID NO: 13 - protein, 555 aa, Streptococcus thermophilus
MSRFNLLDEPWISVIYDEKGSTKDVSLQDLFTNAHQYKELAGDTKTQDFAVLRVLLAVLHTVFSRFDIDGNAYEYLTIDEGWNQLEPVDEMDIENYEEALYETWEKLWTNKRFPNIVNQYLEKWRDRFYLFDQKYPFFQVTKEDIAGDKISKAKGTSILGKNINRIISESGNKIALFSPKDEENKNTLTAAELARWLITFQGYSGVSDKVIFGNEKYTPSKGWLFDIGAIYIKGNTLFETLLLNYISPYNECGNVENIQRPCWERKSSDIIKSYLDEKDITNIASLYTVWSKGIYIDPDFNLNKPFSFDIVKLPDINHRDNFLEPMTLWKYNVSGKNRDSYTPKKHLLNQSLWRSFGLLSIKDTDLQHRKPGVIEWLTYIDDIIGNRLSNIVAISMQDDGNPQSRLPTDEVIDSIFINDLVLTDLDEGGWVPRINEVVEETKKIISRTYKTYINDIKEIRNISNGSYTQQIVESLYFKIDQPFRQWLASIQPEDDKDSKIQEWRVLLKKIVKAEAEVILHQGGARDYLGIQKDGRIKNIATAYNSFDFWLRQQLK

SEQ ID NO: 14 - protein, 197 aa, Streptococcus thermophilus
MSQHTKQTVWTVTKKIIFKLSNQKEETYDKATLAKVRKTLGKPLSEATEIWPILFENLPEEFLSSYQQPSYEELAIYTALQLYALHQQGVSTSVMLDDSKPYENIGSALGKLRKEDDTTSIDRRFNTMITSSTFEELTYHLRHLISLLKVESPVIQVDYSGLANDLYWFLNNSQENVRLNWARAYYKQIKGEKNNDN

SEQ ID NO: 15 - protein, 926 aa, Streptococcus thermophilus
MKHINDYFWAKKTEENSRLLWLPLTQHLEDTKNIAGLLWEHWLSEGQKVLIENSINVKSNIENQGKRLAQFLGAVHDIGKATPAFQTQKGYANSVDLDIQLLEKLERAGFSGISSLQLASPKKSHHSIAGQYLLSHYGVDEDIATIIGGHHGRPVDDLDGLNSQKSYPSNYYQDEKKDSLVYQKWKSNQEAFLNWALTETGFNSVSQLPKIKQPAQVILSGLLIMSDWIASNEHFFPLLSLDETDVKNKSQRIETGFKKWKKSNLWQPETFVDLVTLYQERFGFSPRNFQLILSQTIEKTTNPGIVILEAPMGIGKTEAALAVSEQLSSKKGCSGLFFGLPTQATSNGIFKRIEQWTENIKGNNSDHFSIQLVHGKAALNTDFIELLKGNTINMDDSENGSIFVNEWFSGRKTSALDDFVVGTVDQFLMVALKQKHLALRHLGFSKKVIVIDEVHAYDAYMSQYLLEAIRWMGAYGVPVIILSATLPAQQREKLIKSYMAGMGVKWRDIENIDQIKIDAYPLITYNDGPDIHQVKMFEKQEQKNIYIHRLPEEQLFDIVKEGLDNGGVVGIIVNTVRKSQELARNFSDIFGDDMVDLLHSNFIATERIRKEKDLLQEIGKKAIRPPKKIIIGTQVLEQSLDIDFDVLISDLAPMDLLIQRIGRLHRHKIKRPQKHEVARFYVLGTFEEFDFDEGTRLVYGDYLLARTQYFLPDKIRLPDDISPLVQKVYNSDLTITFPKPELHKKYLDAKIEHDDKIKNKETKAKSYRIANPVLKKSRVRTNSLIGWLKNLHPNDSEEKAYAQVRDIEDTVEVIALKKISDGYGLFIENKDISQNITDPIIAKKVAQNTLRLPMSLSKAYNIDQTINELERYNNSHLSQWQNSSWLKGSLGIIFDKNNEFILNGFKLLYDEKYGVTIERLDKNESV

SEQ ID NO: 16 - protein, 313 aa, Streptococcus thermophilus
MVEKNGAKKTSLRELPKISDRVSFIYVEHAKINRVDSAITVLDSRGTVRIPAAMIGVLLLGPGTDISHRAVELIGDTGTSMVWVGERGVRQYAHGRSLAHSTKFLEKQAKLVSNSRLRLAVARKMYQMRFPDEDVSAMTMQQLRGREGARVRRVYRLQSEKYQVSWTKREYNPDDFEGGDIVNQALSAANVALYGLVHSIVIALGASPGLGFVHTGHDLSFIYDIADLYKAELTIPLAFEIAANFTEIDDIGKIARQKVRDSFVDGKLIVRIVQDIQYLFDLDDDEELLVDTLSLWDDKDMLVKHGVSYKEEL

SEQ ID NO: 17 - protein, 301 aa, Streptococcus thermophilus
MPFTVVTLKSVPPSLRGDLTKWMQEIAIGVYVGNFNSRIREKLWNRIQANVGEGEATISYYYRNEIGYQFDMINSQKSVVDFDGIPLVLIPNSKTSSENYPKLGYSNAAKSRKIKRYSSYRGPQANSLKPYVVIDIETDGLDEKKNTIIEIGAVKFNGQQVEEFNALIKYEEKLPPTIFKLTGISKSLLDQEGRDLKEVLSEFLLFIGDLTLVGYNIHFDIQFINNKLNKFGLPLLINKTHDIMRYVKDEKLFLDNYQLQTALKSYGIEDSVPHRALKDARLIYHLSTKVNKFLARMKEKS

SEQ ID NO: 18 - protein, 7 aa, Simian virus 40
PKKKRKV

SEQ ID NO: 19 - DNA, 735 bp, Artificial
  cas5 no NLS
atgaacgccatgaaaaccatcctcctcaagttcgccggccccctccagagctggggcaccagcagccacttcgaaacccgccacaccgacttctaccccagcaagagcgcggtcatcggcctcctcgccgccagcctcgggtacaggcgcgacgaggatgaaaaaatccagaaattaaatgagctcgacttcgccgtcagggtcgaccagcagggcaacctcctcagggacttccacgtcgcccagaagtacaccgagaagggcaagttcgaccgcaactacgtcaccaaccgctactacctcgaggacgccgtgttcgtcgtcgccctcagccacaccgacgacagcttcatcgacatcattaaaggcgccctcaagaacccctacttccagcccttcatgggcaggagggccctccccatcaccgccgacttcatcctcggcgaaaccgacgtcaaccccctcgagagcctgaagagcctcaagtggcaggccagcctctggttcatgaaaaagagccacgacaaggacgccatcagcctcgaggtctacctcgacagccagctcgtcaacaaggacgtctaccagctccgccaggactacgtccgcagcttcagccagaagggcaggaggttcggcttcaggtacgaggtccgcgaattaatcagcgtccagaacccccactacctcaacaagaatacagagcacaacatcttcgagagcatcggcgactag

SEQ ID NO: 20 - DNA, 639 bp, Artificial
  cas6 no NLS
atgtacatcagcagggtcgagatcgaccgatataataggcgcaaggtcagggacctcacccacgtcggcgcctaccacgcctgggtcgaggagagcttccccagcgagctcgagcaatcaatcaggaccaggaagctctggcgcatcgaccgcatccagggcaaggactacctcatcatcgtcagcaaggagaagcccaacctccagaagctcgaaaaatatggcgtcgtcggcagcgcccagaccaaggactaccagcacttcctcgacagcatcaagaccggcttcaggatgaacttcaggatcgtcctcaaccccgtcatcagcatcaccagccccgacaaatcaaaacgcggcgtcgtcaagccccacgtcaccattaaacaccagatggacttcctcgtcaagcagagcgaaaaaaacggcttcagcctcgtcggcgagagcttctccatcgtcgagaggggctacgaggtgttccagaagcccgagaagcccatcaggctcagcaaggtcgtctacgagggcaccctcaccgtcagcgacgacacgctcttcaagaagatgctcaccgagggcgtcggcaagaagaaagcatatggcttcggcctcatgaccgtcgtccccctcgaggagtag

SEQ ID NO: 21 - DNA, 1068 bp, Artificial
  cas7 no NLS
atgaccaccgagcagcgcctcttcctcgacatccacgccatccagagcctcccccccagcaacatgaacagggacgacaccggcagccccaagaccgcccagtacggcggcgtcaggaggagcagagtctcgtcccaagcatggaagaaggccatgagggagtacttcaacacccacggcgaccactcaaacgtcggcatccgcaccaaggagatcgtccgctacgtcgccgataaaatagtcgagctcgacagcagcatcagcatcgaggacgccctcgagaaggcggacaaggtcctcatcgccgccggaatcaagaagaagggcgaggtcaaggccctctacttcatgggcgacagccaggccaagaagctcgcccaggccgcctacgacaatataacacataaaaaagaactccagaagctcgcgaacgaggaccccgccatcgacatcgccctcttcggcaggatggtcgccgaggaccccaccctgaacgaggactccagcagccaggtcgcccacgcgatcagcacccaccccgtccagacggagttcgacttcttcaccgccgtcgacgacctcgcccccgaggacaacgccggcgccggcatgctcggcacggtcgagttcaacagcagcacgctctacaggtacgccaacgtcgccatccacgagctcagcaagcagctcggcaacaaggagagcctcgagaacagcctcagcctcttcatcgaggccttcgccaagagcctccccaccggcaaggtcaatacatttgccaatcaaaccctcccccagaccctcatcgtcaccgtgaggagcgacaggcccgtcaacctcgtctccgcgttcgaagagcccgtcaaatcaatagagggctacgtcaccaagagcatcgacaagctcgccaaggagttcatcaaggtcgagaagttcgtcgacaagcccctcatgaccttctacgtcaccctccacgagagcgacagcctcaagcagatcggcgaggagaaggacagcgtcagcaagctcctcgaggacttcagcgagatgatcgcccagtacatctag

SEQ ID NO: 22 - DNA, 1668 bp, Artificial
  cse1 no NLS
atgagccgcttcaacctcctcgacgagccctggatcagcgtcatctacgacgagaagggcagcaccaaggacgtcagcctccaggacctcttcaccaacgcccaccagtacaaggagctcgccggcgacaccaagacccaggacttcgccgtcctcagggtcctcctcgccgtcctccacaccgtgttcagccgcttcgacatcgacggcaacgcctacgagtacctcaccatcgacgagggctggaaccagctcgagcccgtcgacgagatggacatcgagaactacgaggaggccctctatgaaacatgggagaagctctggaccaataaaagattccccaacatcgtcaatcaatacctcgagaagtggagggaccgcttctacctcttcgaccagaagtaccccttcttccaggtcaccaaggaggacatcgccggcgataaaattagcaaggccaagggcaccagcatcctcggcaaaaatataaatcgcatcatcagcgagagcggcaacaagatcgccctcttcagccccaaggacgaggaaaataaaaatactctcaccgccgccgagctcgccaggtggctcatcaccttccagggctacagcggcgtcagcgacaaggtcatcttcggcaatgaaaaatatacccccagcaagggctggctcttcgacatcggcgccatctacattaaaggcaacaccctcttcgaaaccctcctcctcaactacatcagcccctacaacgagtgcggcaatgtggaaaatatacagaggccctgctgggagaggaagagcagcgacatcattaaaagctacctcgatgaaaaagacatcaccaacatcgccagcctctacaccgtctggagcaagggcatctacatcgaccccgacttcaacctcaataaacccttcagcttcgacatcgtcaagctccccgacatcaaccaccgcgacaacttcctcgagcccatgaccctctggaagtacaacgtcagcggcaaaaatagggacagctacacccccaagaagcacctcctcaaccagagcctctggaggagcttcggcctcctgagcataaaagacaccgacctccagcacaggaagcccggcgtcatcgagtggctcacctacatcgacgatataataggcaacaggctcagcaacatcgtcgccatcagcatgcaggacgacggcaacccccagagcaggctgcccaccgacgaggtcatcgacagcatcttcatcaacgacctcgtcctcaccgacctcgacgagggcggctgggtccccaggatcaacgaggtcgtcgaggaaaccaagaagatcatcagcaggacatataaaacgtacattaatgatataaaggagatccgcaacatcagcaacggcagctacacccagcagatcgtcgagagcctctacttcaagatcgaccagcccttcaggcagtggctcgccagcatccagcccgaggacgacaaggacagcaagatccaggagtggcgcgtcctcctcaagaaaatagtcaaggccgaggccgaggtcatcctccaccagggcggcgccagggactacctcggcatccagaaggacggccgaattaagaacatcgccaccgcctacaacagcttcgacttctggctccgccagcagttaaaatag

SEQ ID NO: 23 - DNA, 594 bp, Artificial
  cse2 no NLS
atgagccagcatactaaacagaccgtctggaccgtcaccaagaagatcatcttcaagctcagcaaccaaaaggaggaaacctacgacaaggccaccctcgccaaggtcagaaagaccctcggcaagcccctcagcgaggccaccgagatctggcccatcctcttcgagaacctccccgaggagttcctcagcagctaccagcaaccaagctacgaggagctcgccatctacaccgccctccagctctacgccctccaccagcagggcgtcagcacctccgtcatgctggacgacagcaagccctatgaaaatataggcagcgccctcgggaagctgaggaaggaggacgacaccaccagcatcgacaggaggttcaacaccatgatcaccagcagcaccttcgaggagctcacctaccacctcaggcacctcatcagcctcctcaaggtcgagtcccccgtcatccaggtcgactacagcggcctcgccaacgacctctactggttcctcaataatagccaggagaacgtcaggctcaactgggcccgcgcctactacaagcaaattaaaggcgagaagaacaacgacaactag

SEQ ID NO: 24 - DNA, 762 bp, Artificial
  cas5 N terminal NLS
atggcccccaagaagaagcgcaaggtcatgaacgccatgaaaaccatcctcctcaagttcgccggccccctccagagctggggcaccagcagccacttcgaaacccgccacaccgacttctaccccagcaagagcgcggtcatcggcctcctcgccgccagcctcgggtacaggcgcgacgaggatgaaaaaatccagaaattaaatgagctcgacttcgccgtcagggtcgaccagcagggcaacctcctcagggacttccacgtcgcccagaagtacaccgagaagggcaagttcgaccgcaactacgtcaccaaccgctactacctcgaggacgccgtgttcgtcgtcgccctcagccacaccgacgacagcttcatcgacatcattaaaggcgccctcaagaacccctacttccagcccttcatgggcaggagggccctccccatcaccgccgacttcatcctcggcgaaaccgacgtcaaccccctcgagagcctgaagagcctcaagtggcaggccagcctctggttcatgaaaaagagccacgacaaggacgccatcagcctcgaggtctacctcgacagccagctcgtcaacaaggacgtctaccagctccgccaggactacgtccgcagcttcagccagaagggcaggaggttcggcttcaggtacgaggtccgcgaattaatcagcgtccagaacccccactacctcaacaagaatacagagcacaacatcttcgagagcatcggcgactag

SEQ ID NO: 25 - DNA, 768 bp, Artificial
  cas5 C terminal NLS
atgaacgccatgaaaaccatcctcctcaagttcgccggccccctccagagctggggcaccagcagccacttcgaaacccgccacaccgacttctaccccagcaagagcgcggtcatcggcctcctcgccgccagcctcgggtacaggcgcgacgaggatgaaaaaatccagaaattaaatgagctcgacttcgccgtcagggtcgaccagcagggcaacctcctcagggacttccacgtcgcccagaagtacaccgagaagggcaagttcgaccgcaactacgtcaccaaccgctactacctcgaggacgccgtgttcgtcgtcgccctcagccacaccgacgacagcttcatcgacatcattaaaggcgccctcaagaacccctacttccagcccttcatgggcaggagggccctccccatcaccgccgacttcatcctcggcgaaaccgacgtcaaccccctcgagagcctgaagagcctcaagtggcaggccagcctctggttcatgaaaaagagccacgacaaggacgccatcagcctcgaggtctacctcgacagccagctcgtcaacaaggacgtctaccagctccgccaggactacgtccgcagcttcagccagaagggcaggaggttcggcttcaggtacgaggtccgcgaattaatcagcgtccagaacccccactacctcaacaagaatacagagcacaacatcttcgagagcatcggcgacagcagggccgaccccaagaagaagaggaaggtgtag

SEQ ID NO: 26 - DNA, 1695 bp, Artificial
  cse1 N terminal NLS
atggcccccaagaagaagcgcaaggtcatgagccgcttcaacctcctcgacgagccctggatcagcgtcatctacgacgagaagggcagcaccaaggacgtcagcctccaggacctcttcaccaacgcccaccagtacaaggagctcgccggcgacaccaagacccaggacttcgccgtcctcagggtcctcctcgccgtcctccacaccgtgttcagccgcttcgacatcgacggcaacgcctacgagtacctcaccatcgacgagggctggaaccagctcgagcccgtcgacgagatggacatcgagaactacgaggaggccctctatgaaacatgggagaagctctggaccaataaaagattccccaacatcgtcaatcaatacctcgagaagtggagggaccgcttctacctcttcgaccagaagtaccccttcttccaggtcaccaaggaggacatcgccggcgataaaattagcaaggccaagggcaccagcatcctcggcaaaaatataaatcgcatcatcagcgagagcggcaacaagatcgccctcttcagccccaaggacgaggaaaataaaaatactctcaccgccgccgagctcgccaggtggctcatcaccttccagggctacagcggcgtcagcgacaaggtcatcttcggcaatgaaaaatatacccccagcaagggctggctcttcgacatcggcgccatctacattaaaggcaacaccctcttcgaaaccctcctcctcaactacatcagcccctacaacgagtgcggcaatgtggaaaatatacagaggccctgctgggagaggaagagcagcgacatcattaaaagctacctcgatgaaaaagacatcaccaacatcgccagcctctacaccgtctggagcaagggcatctacatcgaccccgacttcaacctcaataaacccttcagcttcgacatcgtcaagctccccgacatcaaccaccgcgacaacttcctcgagcccatgaccctctggaagtacaacgtcagcggcaaaaatagggacagctacacccccaagaagcacctcctcaaccagagcctctggaggagcttcggcctcctgagcataaaagacaccgacctccagcacaggaagcccggcgtcatcgagtggctcacctacatcgacgatataataggcaacaggctcagcaacatcgtcgccatcagcatgcaggacgacggcaacccccagagcaggctgcccaccgacgaggtcatcgacagcatcttcatcaacgacctcgtcctcaccgacctcgacgagggcggctgggtccccaggatcaacgaggtcgtcgaggaaaccaagaagatcatcagcaggacatataaaacgtacattaatgatataaaggagatccgcaacatcagcaacggcagctacacccagcagatcgtcgagagcctctacttcaagatcgaccagcccttcaggcagtggctcgccagcatccagcccgaggacgacaaggacagcaagatccaggagtggcgcgtcctcctcaagaaaatagtcaaggccgaggccgaggtcatcctccaccagggcggcgccagggactacctcggcatccagaaggacggccgaattaagaacatcgccaccgcctacaacagcttcgacttctggctccgccagcagttaaaatag

SEQ ID NO: 27 - DNA, 672 bp, Artificial
  cas6 C terminal NLS
atgtacatcagcagggtcgagatcgaccgatataataggcgcaaggtcagggacctcacccacgtcggcgcctaccacgcctgggtcgaggagagcttccccagcgagctcgagcaatcaatcaggaccaggaagctctggcgcatcgaccgcatccagggcaaggactacctcatcatcgtcagcaaggagaagcccaacctccagaagctcgaaaaatatggcgtcgtcggcagcgcccagaccaaggactaccagcacttcctcgacagcatcaagaccggcttcaggatgaacttcaggatcgtcctcaaccccgtcatcagcatcaccagccccgacaaatcaaaacgcggcgtcgtcaagccccacgtcaccattaaacaccagatggacttcctcgtcaagcagagcgaaaaaaacggcttcagcctcgtcggcgagagcttctccatcgtcgagaggggctacgaggtgttccagaagcccgagaagcccatcaggctcagcaaggtcgtctacgagggcaccctcaccgtcagcgacgacacgctcttcaagaagatgctcaccgagggcgtcggcaagaagaaagcatatggcttcggcctcatgaccgtcgtccccctcgaggagagcagggccgaccccaagaagaagaggaaggtctag

SEQ ID NO: 28 - DNA, 1101 bp, Artificial
  cas7 C terminal NLS
atgaccaccgagcagcgcctcttcctcgacatccacgccatccagagcctcccccccagcaacatgaacagggacgacaccggcagccccaagaccgcccagtacggcggcgtcaggaggagcagagtctcgtcccaagcatggaagaaggccatgagggagtacttcaacacccacggcgaccactcaaacgtcggcatccgcaccaaggagatcgtccgctacgtcgccgataaaatagtcgagctcgacagcagcatcagcatcgaggacgccctcgagaaggcggacaaggtcctcatcgccgccggaatcaagaagaagggcgaggtcaaggccctctacttcatgggcgacagccaggccaagaagctcgcccaggccgcctacgacaatataacacataaaaaagaactccagaagctcgcgaacgaggaccccgccatcgacatcgccctcttcggcaggatggtcgccgaggaccccaccctgaacgaggactccagcagccaggtcgcccacgcgatcagcacccaccccgtccagacggagttcgacttcttcaccgccgtcgacgacctcgcccccgaggacaacgccggcgccggcatgctcggcacggtcgagttcaacagcagcacgctctacaggtacgccaacgtcgccatccacgagctcagcaagcagctcggcaacaaggagagcctcgagaacagcctcagcctcttcatcgaggccttcgccaagagcctccccaccggcaaggtcaatacatttgccaatcaaaccctcccccagaccctcatcgtcaccgtgaggagcgacaggcccgtcaacctcgtctccgcgttcgaagagcccgtcaaatcaatagagggctacgtcaccaagagcatcgacaagctcgccaaggagttcatcaaggtcgagaagttcgtcgacaagcccctcatgaccttctacgtcaccctccacgagagcgacagcctcaagcagatcggcgaggagaaggacagcgtcagcaagctcctcgaggacttcagcgagatgatcgcccagtacatcagccgcgccgaccccaagaagaagcgcaaggtctag

SEQ ID NO: 29 - DNA, 627 bp, Artificial
  cse2 C terminal NLS
atgagccagcatactaaacagaccgtctggaccgtcaccaagaagatcatcttcaagctcagcaaccaaaaggaggaaacctacgacaaggccaccctcgccaaggtcagaaagaccctcggcaagcccctcagcgaggccaccgagatctggcccatcctcttcgagaacctccccgaggagttcctcagcagctaccagcaaccaagctacgaggagctcgccatctacaccgccctccagctctacgccctccaccagcagggcgtcagcacctccgtcatgctggacgacagcaagccctatgaaaatataggcagcgccctcgggaagctgaggaaggaggacgacaccaccagcatcgacaggaggttcaacaccatgatcaccagcagcaccttcgaggagctcacctaccacctcaggcacctcatcagcctcctcaaggtcgagtcccccgtcatccaggtcgactacagcggcctcgccaacgacctctactggttcctcaataatagccaggagaacgtcaggctcaactgggcccgcgcctactacaagcaaattaaaggcgagaagaacaacgacaacagccgcgccgaccccaagaagaagaggaaggtctag

SEQ ID NO: 30 - protein, 253 aa, Artificial
  cas5 N terminal NLS protein
MAPKKKRKVMNAMKTILLKFAGPLQSWGTSSHFETRHTDFYPSKSAVIGLLAASLGYRRDEDEKIQKLNELDFAVRVDQQGNLLRDFHVAQKYTEKGKFDRNYVTNRYYLEDAVFVVALSHTDDSFIDIIKGALKNPYFQPFMGRRALPITADFILGETDVNPLESLKSLKWQASLWFMKKSHDKDAISLEVYLDSQLVNKDVYQLRQDYVRSFSQKGRRFGFRYEVRELISVQNPHYLNKNTEHNIFESIGD

SEQ ID NO: 31 - protein, 255 aa, Artificial
  cas5 C terminal NLS protein
MNAMKTILLKFAGPLQSWGTSSHFETRHTDFYPSKSAVIGLLAASLGYRRDEDEKIQKLNELDFAVRVDQQGNLLRDFHVAQKYTEKGKFDRNYVTNRYYLEDAVFVVALSHTDDSFIDIIKGALKNPYFQPFMGRRALPITADFILGETDVNPLESLKSLKWQASLWFMKKSHDKDAISLEVYLDSQLVNKDVYQLRQDYVRSFSQKGRRFGFRYEVRELISVQNPHYLNKNTEHNIFESIGDSRADPKKKRKV

SEQ ID NO: 32 - protein, 564 aa, Artificial
  cse1 N terminal NLS protein
MAPKKKRKVMSRFNLLDEPWISVIYDEKGSTKDVSLQDLFTNAHQYKELAGDTKTQDFAVLRVLLAVLHTVFSRFDIDGNAYEYLTIDEGWNQLEPVDEMDIENYEEALYETWEKLWTNKRFPNIVNQYLEKWRDRFYLFDQKYPFFQVTKEDIAGDKISKAKGTSILGKNINRIISESGNKIALFSPKDEENKNTLTAAELARWLITFQGYSGVSDKVIFGNEKYTPSKGWLFDIGAIYIKGNTLFETLLLNYISPYNECGNVENIQRPCWERKSSDIIKSYLDEKDITNIASLYTVWSKGIYIDPDFNLNKPFSFDIVKLPDINHRDNFLEPMTLWKYNVSGKNRDSYTPKKHLLNQSLWRSFGLLSIKDTDLQHRKPGVIEWLTYIDDIIGNRLSNIVAISMQDDGNPQSRLPTDEVIDSIFINDLVLTDLDEGGWVPRINEVVEETKKIISRTYKTYINDIKEIRNISNGSYTQQIVESLYFKIDQPFRQWLASIQPEDDKDSKIQEWRVLLKKIVKAEAEVILHQGGARDYLGIQKDGRIKNIATAYNSFDFWLRQQLK

SEQ ID NO: 33 - protein, 223 aa, Artificial
  cas6 C terminal NLS protein
MYISRVEIDRYNRRKVRDLTHVGAYHAWVEESFPSELEQSIRTRKLWRIDRIQGKDYLIIVSKEKPNLQKLEKYGVVGSAQTKDYQHFLDSIKTGFRMNFRIVLNPVISITSPDKSKRGVVKPHVTIKHQMDFLVKQSEKNGFSLVGESFSIVERGYEVFQKPEKPIRLSKVVYEGTLTVSDDTLFKKMLTEGVGKKKAYGFGLMTVVPLEESRADPKKKRKV

SEQ ID NO: 34 - protein, 366 aa, Artificial
  cas7 C terminal NLS protein
MTTEQRLFLDIHAIQSLPPSNMNRDDTGSPKTAQYGGVRRSRVSSQAWKKAMREYFNTHGDHSNVGIRTKEIVRYVADKIVELDSSISIEDALEKADKVLIAAGIKKKGEVKALYFMGDSQAKKLAQAAYDNITHKKELQKLANEDPAIDIALFGRMVAEDPTLNEDSSSQVAHAISTHPVQTEFDFFTAVDDLAPEDNAGAGMLGTVEFNSSTLYRYANVAIHELSKQLGNKESLENSLSLFIEAFAKSLPTGKVNTFANQTLPQTLIVTVRSDRPVNLVSAFEEPVKSIEGYVTKSIDKLAKEFIKVEKFVDKPLMTFYVTLHESDSLKQIGEEKDSVSKLLEDFSEMIAQYISRADPKKKRKV

SEQ ID NO: 35 - protein, 208 aa, Artificial
  cse2 C terminal NLS protein
MSQHTKQTVWTVTKKIIFKLSNQKEETYDKATLAKVRKTLGKPLSEATEIWPILFENLPEEFLSSYQQPSYEELAIYTALQLYALHQQGVSTSVMLDDSKPYENIGSALGKLRKEDDTTSIDRRFNTMITSSTFEELTYHLRHLISLLKVESPVIQVDYSGLANDLYWFLNNSQENVRLNWARAYYKQIKGEKNNDNSRADPKKKRKV

SEQ ID NO: 36 - DNA, 896 bp, Zea mays
gtgcagcgtgacccggtcgtgcccctctctagagataatgagcattgcatgtctaagttataaaaaattaccacatattttttttgtcacacttgtttgaagtgcagtttatctatctttatacatatatttaaactttactctacgaataatataatctatagtactacaataatatcagtgttttagagaatcatataaatgaacagttagacatggtctaaaggacaattgagtattttgacaacaggactctacagttttatctttttagtgtgcatgtgttctcctttttttttgcaaatagcttcacctatataatacttcatccattttattagtacatccatttagggtttagggttaatggtttttatagactaatttttttagtacatctattttattctattttagcctctaaattaagaaaactaaaactctattttagtttttttatttaataatttagatataaaatagaataaaataaagtgactaaaaattaaacaaataccctttaagaaattaaaaaaactaaggaaacatttttcttgtttcgagtagataatgccagcctgttaaacgccgtcgacgagtctaacggacaccaaccagcgaaccagcagcgtcgcgtcgggccaagcgaagcagacggcacggcatctctgtcgctgcctctggacccctctcgagagttccgctccaccgttggacttgctccgctgtcggcatccagaaattgcgtggcggagcggcagacgtgagccggcacggcaggcggcctcctcctcctctcacggcaccggcagctacgggggattcctttcccaccgctccttcgctttcccttcctcgcccgccgtaataaatagacaccccctccacaccctctt

SEQ ID NO: 37 - DNA, 82 bp, Zea mays
tccccaacctcgtgttgttcggagcgcacacacacacaaccagatctcccccaaatccacccgtcggcacctccgcttcaag

SEQ ID NO: 38 - DNA, 1013 bp, Zea mays
gtacgccgctcgtcctcccccccccccctctctaccttctctagatcggcgttccggtccatgcatggttagggcccggtagttctacttctgttcatgtttgtgttagatccgtgtttgtgttagatccgtgctgctagcgttcgtacacggatgcgacctgtacgtcagacacgttctgattgctaacttgccagtgtttctctttggggaatcctgggatggctctagccgttccgcagacgggatcgatttcatgattttttttgtttcgttgcatagggtttggtttgcccttttcctttatttcaatatatgccgtgcacttgtttgtcgggtcatcttttcatgcttttttttgtcttggttgtgatgatgtggtctggttgggcggtcgttctagatcggagtagaattctgtttcaaactacctggtggatttattaattttggatctgtatgtgtgtgccatacatattcatagttacgaattgaagatgatggatggaaatatcgatctaggataggtatacatgttgatgcgggttttactgatgcatatacagagatgctttttgttcgcttggttgtgatgatgtggtgtggttgggcggtcgttcattcgttctagatcggagtagaatactgtttcaaactacctggtgtatttattaattttggaactgtatgtgtgtgtcatacatcttcatagttacgagtttaagatggatggaaatatcgatctaggataggtatacatgttgatgtgggttttactgatgcatatacatgatggcatatgcagcatctattcatatgctctaaccttgagtacctatctattataataaacaagtatgttttataattattttgatcttgatatacttggatgatggcatatgcagcagctatatgtggatttttttagccctgccttcatacgctatttatttgcttggtactgtttcttttgtcgatgctcaccctgttgtttggtgttacttctgcag

SEQ ID NO: 39 - DNA, 3069 bp, Artificial
  UBI  cas5 no NLS
gtgcagcgtgacccggtcgtgcccctctctagagataatgagcattgcatgtctaagttataaaaaattaccacatattttttttgtcacacttgtttgaagtgcagtttatctatctttatacatatatttaaactttactctacgaataatataatctatagtactacaataatatcagtgttttagagaatcatataaatgaacagttagacatggtctaaaggacaattgagtattttgacaacaggactctacagttttatctttttagtgtgcatgtgttctcctttttttttgcaaatagcttcacctatataatacttcatccattttattagtacatccatttagggtttagggttaatggtttttatagactaatttttttagtacatctattttattctattttagcctctaaattaagaaaactaaaactctattttagtttttttatttaataatttagatataaaatagaataaaataaagtgactaaaaattaaacaaataccctttaagaaattaaaaaaactaaggaaacatttttcttgtttcgagtagataatgccagcctgttaaacgccgtcgacgagtctaacggacaccaaccagcgaaccagcagcgtcgcgtcgggccaagcgaagcagacggcacggcatctctgtcgctgcctctggacccctctcgagagttccgctccaccgttggacttgctccgctgtcggcatccagaaattgcgtggcggagcggcagacgtgagccggcacggcaggcggcctcctcctcctctcacggcaccggcagctacgggggattcctttcccaccgctccttcgctttcccttcctcgcccgccgtaataaatagacaccccctccacaccctctttccccaacctcgtgttgttcggagcgcacacacacacaaccagatctcccccaaatccacccgtcggcacctccgcttcaaggtacgccgctcgtcctcccccccccccctctctaccttctctagatcggcgttccggtccatgcatggttagggcccggtagttctacttctgttcatgtttgtgttagatccgtgtttgtgttagatccgtgctgctagcgttcgtacacggatgcgacctgtacgtcagacacgttctgattgctaacttgccagtgtttctctttggggaatcctgggatggctctagccgttccgcagacgggatcgatttcatgattttttttgtttcgttgcatagggtttggtttgcccttttcctttatttcaatatatgccgtgcacttgtttgtcgggtcatcttttcatgcttttttttgtcttggttgtgatgatgtggtctggttgggcggtcgttctagatcggagtagaattctgtttcaaactacctggtggatttattaattttggatctgtatgtgtgtgccatacatattcatagttacgaattgaagatgatggatggaaatatcgatctaggataggtatacatgttgatgcgggttttactgatgcatatacagagatgctttttgttcgcttggttgtgatgatgtggtgtggttgggcggtcgttcattcgttctagatcggagtagaatactgtttcaaactacctggtgtatttattaattttggaactgtatgtgtgtgtcatacatcttcatagttacgagtttaagatggatggaaatatcgatctaggataggtatacatgttgatgtgggttttactgatgcatatacatgatggcatatgcagcatctattcatatgctctaaccttgagtacctatctattataataaacaagtatgttttataattattttgatcttgatatacttggatgatggcatatgcagcagctatatgtggatttttttagccctgccttcatacgctatttatttgcttggtactgtttcttttgtcgatgctcaccctgttgtttggtgttacttctgcaggtcgactctagaggatccatgaacgccatgaaaaccatcctcctcaagttcgccggccccctccagagctggggcaccagcagccacttcgaaacccgccacaccgacttctaccccagcaagagcgcggtcatcggcctcctcgccgccagcctcgggtacaggcgcgacgaggatgaaaaaatccagaaattaaatgagctcgacttcgccgtcagggtcgaccagcagggcaacctcctcagggacttccacgtcgcccagaagtacaccgagaagggcaagttcgaccgcaactacgtcaccaaccgctactacctcgaggacgccgtgttcgtcgtcgccctcagccacaccgacgacagcttcatcgacatcattaaaggcgccctcaagaacccctacttccagcccttcatgggcaggagggccctccccatcaccgccgacttcatcctcggcgaaaccgacgtcaaccccctcgagagcctgaagagcctcaagtggcaggccagcctctggttcatgaaaaagagccacgacaaggacgccatcagcctcgaggtctacctcgacagccagctcgtcaacaaggacgtctaccagctccgccaggactacgtccgcagcttcagccagaagggcaggaggttcggcttcaggtacgaggtccgcgaattaatcagcgtccagaacccccactacctcaacaagaatacagagcacaacatcttcgagagcatcggcgactagtcttcgtaagttaacctagacttgtccatcttctggattggccaacttaattaatgtatgaaataaaaggatgcacacatagtgacatgctaatcactataatgtgggcatcaaagttgtgtgttatgtgtaattactagttatctgaataaaagagaaagagatcatccatatttcttatcctaaatgaatgtcacgtgtctttataattctttgatgaaccagatgcatttcattaaccaaatccatatacatataaatattaatcatatataattaatatcaattgggttagcaaaacaaatctagtctaggtgtgttttgc

SEQ ID NO: 40 - DNA, 2973 bp, Artificial
  UBI  cas6 no NLS
gtgcagcgtgacccggtcgtgcccctctctagagataatgagcattgcatgtctaagttataaaaaattaccacatattttttttgtcacacttgtttgaagtgcagtttatctatctttatacatatatttaaactttactctacgaataatataatctatagtactacaataatatcagtgttttagagaatcatataaatgaacagttagacatggtctaaaggacaattgagtattttgacaacaggactctacagttttatctttttagtgtgcatgtgttctcctttttttttgcaaatagcttcacctatataatacttcatccattttattagtacatccatttagggtttagggttaatggtttttatagactaatttttttagtacatctattttattctattttagcctctaaattaagaaaactaaaactctattttagtttttttatttaataatttagatataaaatagaataaaataaagtgactaaaaattaaacaaataccctttaagaaattaaaaaaactaaggaaacatttttcttgtttcgagtagataatgccagcctgttaaacgccgtcgacgagtctaacggacaccaaccagcgaaccagcagcgtcgcgtcgggccaagcgaagcagacggcacggcatctctgtcgctgcctctggacccctctcgagagttccgctccaccgttggacttgctccgctgtcggcatccagaaattgcgtggcggagcggcagacgtgagccggcacggcaggcggcctcctcctcctctcacggcaccggcagctacgggggattcctttcccaccgctccttcgctttcccttcctcgcccgccgtaataaatagacaccccctccacaccctctttccccaacctcgtgttgttcggagcgcacacacacacaaccagatctcccccaaatccacccgtcggcacctccgcttcaaggtacgccgctcgtcctcccccccccccctctctaccttctctagatcggcgttccggtccatgcatggttagggcccggtagttctacttctgttcatgtttgtgttagatccgtgtttgtgttagatccgtgctgctagcgttcgtacacggatgcgacctgtacgtcagacacgttctgattgctaacttgccagtgtttctctttggggaatcctgggatggctctagccgttccgcagacgggatcgatttcatgattttttttgtttcgttgcatagggtttggtttgcccttttcctttatttcaatatatgccgtgcacttgtttgtcgggtcatcttttcatgcttttttttgtcttggttgtgatgatgtggtctggttgggcggtcgttctagatcggagtagaattctgtttcaaactacctggtggatttattaattttggatctgtatgtgtgtgccatacatattcatagttacgaattgaagatgatggatggaaatatcgatctaggataggtatacatgttgatgcgggttttactgatgcatatacagagatgctttttgttcgcttggttgtgatgatgtggtgtggttgggcggtcgttcattcgttctagatcggagtagaatactgtttcaaactacctggtgtatttattaattttggaactgtatgtgtgtgtcatacatcttcatagttacgagtttaagatggatggaaatatcgatctaggataggtatacatgttgatgtgggttttactgatgcatatacatgatggcatatgcagcatctattcatatgctctaaccttgagtacctatctattataataaacaagtatgttttataattattttgatcttgatatacttggatgatggcatatgcagcagctatatgtggatttttttagccctgccttcatacgctatttatttgcttggtactgtttcttttgtcgatgctcaccctgttgtttggtgttacttctgcaggtcgactctagaggatccatgtacatcagcagggtcgagatcgaccgatataataggcgcaaggtcagggacctcacccacgtcggcgcctaccacgcctgggtcgaggagagcttccccagcgagctcgagcaatcaatcaggaccaggaagctctggcgcatcgaccgcatccagggcaaggactacctcatcatcgtcagcaaggagaagcccaacctccagaagctcgaaaaatatggcgtcgtcggcagcgcccagaccaaggactaccagcacttcctcgacagcatcaagaccggcttcaggatgaacttcaggatcgtcctcaaccccgtcatcagcatcaccagccccgacaaatcaaaacgcggcgtcgtcaagccccacgtcaccattaaacaccagatggacttcctcgtcaagcagagcgaaaaaaacggcttcagcctcgtcggcgagagcttctccatcgtcgagaggggctacgaggtgttccagaagcccgagaagcccatcaggctcagcaaggtcgtctacgagggcaccctcaccgtcagcgacgacacgctcttcaagaagatgctcaccgagggcgtcggcaagaagaaagcatatggcttcggcctcatgaccgtcgtccccctcgaggagtagtcttcgtaagttaacctagacttgtccatcttctggattggccaacttaattaatgtatgaaataaaaggatgcacacatagtgacatgctaatcactataatgtgggcatcaaagttgtgtgttatgtgtaattactagttatctgaataaaagagaaagagatcatccatatttcttatcctaaatgaatgtcacgtgtctttataattctttgatgaaccagatgcatttcattaaccaaatccatatacatataaatattaatcatatataattaatatcaattgggttagcaaaacaaatctagtctaggtgtgttttgc

SEQ ID NO: 41 - DNA, 3402 bp, Artificial
  UBI  cas7 no NLS
gtgcagcgtgacccggtcgtgcccctctctagagataatgagcattgcatgtctaagttataaaaaattaccacatattttttttgtcacacttgtttgaagtgcagtttatctatctttatacatatatttaaactttactctacgaataatataatctatagtactacaataatatcagtgttttagagaatcatataaatgaacagttagacatggtctaaaggacaattgagtattttgacaacaggactctacagttttatctttttagtgtgcatgtgttctcctttttttttgcaaatagcttcacctatataatacttcatccattttattagtacatccatttagggtttagggttaatggtttttatagactaatttttttagtacatctattttattctattttagcctctaaattaagaaaactaaaactctattttagtttttttatttaataatttagatataaaatagaataaaataaagtgactaaaaattaaacaaataccctttaagaaattaaaaaaactaaggaaacatttttcttgtttcgagtagataatgccagcctgttaaacgccgtcgacgagtctaacggacaccaaccagcgaaccagcagcgtcgcgtcgggccaagcgaagcagacggcacggcatctctgtcgctgcctctggacccctctcgagagttccgctccaccgttggacttgctccgctgtcggcatccagaaattgcgtggcggagcggcagacgtgagccggcacggcaggcggcctcctcctcctctcacggcaccggcagctacgggggattcctttcccaccgctccttcgctttcccttcctcgcccgccgtaataaatagacaccccctccacaccctctttccccaacctcgtgttgttcggagcgcacacacacacaaccagatctcccccaaatccacccgtcggcacctccgcttcaaggtacgccgctcgtcctcccccccccccctctctaccttctctagatcggcgttccggtccatgcatggttagggcccggtagttctacttctgttcatgtttgtgttagatccgtgtttgtgttagatccgtgctgctagcgttcgtacacggatgcgacctgtacgtcagacacgttctgattgctaacttgccagtgtttctctttggggaatcctgggatggctctagccgttccgcagacgggatcgatttcatgattttttttgtttcgttgcatagggtttggtttgcccttttcctttatttcaatatatgccgtgcacttgtttgtcgggtcatcttttcatgcttttttttgtcttggttgtgatgatgtggtctggttgggcggtcgttctagatcggagtagaattctgtttcaaactacctggtggatttattaattttggatctgtatgtgtgtgccatacatattcatagttacgaattgaagatgatggatggaaatatcgatctaggataggtatacatgttgatgcgggttttactgatgcatatacagagatgctttttgttcgcttggttgtgatgatgtggtgtggttgggcggtcgttcattcgttctagatcggagtagaatactgtttcaaactacctggtgtatttattaattttggaactgtatgtgtgtgtcatacatcttcatagttacgagtttaagatggatggaaatatcgatctaggataggtatacatgttgatgtgggttttactgatgcatatacatgatggcatatgcagcatctattcatatgctctaaccttgagtacctatctattataataaacaagtatgttttataattattttgatcttgatatacttggatgatggcatatgcagcagctatatgtggatttttttagccctgccttcatacgctatttatttgcttggtactgtttcttttgtcgatgctcaccctgttgtttggtgttacttctgcaggtcgactctagaggatccatgaccaccgagcagcgcctcttcctcgacatccacgccatccagagcctcccccccagcaacatgaacagggacgacaccggcagccccaagaccgcccagtacggcggcgtcaggaggagcagagtctcgtcccaagcatggaagaaggccatgagggagtacttcaacacccacggcgaccactcaaacgtcggcatccgcaccaaggagatcgtccgctacgtcgccgataaaatagtcgagctcgacagcagcatcagcatcgaggacgccctcgagaaggcggacaaggtcctcatcgccgccggaatcaagaagaagggcgaggtcaaggccctctacttcatgggcgacagccaggccaagaagctcgcccaggccgcctacgacaatataacacataaaaaagaactccagaagctcgcgaacgaggaccccgccatcgacatcgccctcttcggcaggatggtcgccgaggaccccaccctgaacgaggactccagcagccaggtcgcccacgcgatcagcacccaccccgtccagacggagttcgacttcttcaccgccgtcgacgacctcgcccccgaggacaacgccggcgccggcatgctcggcacggtcgagttcaacagcagcacgctctacaggtacgccaacgtcgccatccacgagctcagcaagcagctcggcaacaaggagagcctcgagaacagcctcagcctcttcatcgaggccttcgccaagagcctccccaccggcaaggtcaatacatttgccaatcaaaccctcccccagaccctcatcgtcaccgtgaggagcgacaggcccgtcaacctcgtctccgcgttcgaagagcccgtcaaatcaatagagggctacgtcaccaagagcatcgacaagctcgccaaggagttcatcaaggtcgagaagttcgtcgacaagcccctcatgaccttctacgtcaccctccacgagagcgacagcctcaagcagatcggcgaggagaaggacagcgtcagcaagctcctcgaggacttcagcgagatgatcgcccagtacatctagtcttcgtaagttaacctagacttgtccatcttctggattggccaacttaattaatgtatgaaataaaaggatgcacacatagtgacatgctaatcactataatgtgggcatcaaagttgtgtgttatgtgtaattactagttatctgaataaaagagaaagagatcatccatatttcttatcctaaatgaatgtcacgtgtctttataattctttgatgaaccagatgcatttcattaaccaaatccatatacatataaatattaatcatatataattaatatcaattgggttagcaaaacaaatctagtctaggtgtgttttgc

SEQ ID NO: 42 - DNA, 4002 bp, Artificial
  UBI  cse1 no NLS
gtgcagcgtgacccggtcgtgcccctctctagagataatgagcattgcatgtctaagttataaaaaattaccacatattttttttgtcacacttgtttgaagtgcagtttatctatctttatacatatatttaaactttactctacgaataatataatctatagtactacaataatatcagtgttttagagaatcatataaatgaacagttagacatggtctaaaggacaattgagtattttgacaacaggactctacagttttatctttttagtgtgcatgtgttctcctttttttttgcaaatagcttcacctatataatacttcatccattttattagtacatccatttagggtttagggttaatggtttttatagactaatttttttagtacatctattttattctattttagcctctaaattaagaaaactaaaactctattttagtttttttatttaataatttagatataaaatagaataaaataaagtgactaaaaattaaacaaataccctttaagaaattaaaaaaactaaggaaacatttttcttgtttcgagtagataatgccagcctgttaaacgccgtcgacgagtctaacggacaccaaccagcgaaccagcagcgtcgcgtcgggccaagcgaagcagacggcacggcatctctgtcgctgcctctggacccctctcgagagttccgctccaccgttggacttgctccgctgtcggcatccagaaattgcgtggcggagcggcagacgtgagccggcacggcaggcggcctcctcctcctctcacggcaccggcagctacgggggattcctttcccaccgctccttcgctttcccttcctcgcccgccgtaataaatagacaccccctccacaccctctttccccaacctcgtgttgttcggagcgcacacacacacaaccagatctcccccaaatccacccgtcggcacctccgcttcaaggtacgccgctcgtcctcccccccccccctctctaccttctctagatcggcgttccggtccatgcatggttagggcccggtagttctacttctgttcatgtttgtgttagatccgtgtttgtgttagatccgtgctgctagcgttcgtacacggatgcgacctgtacgtcagacacgttctgattgctaacttgccagtgtttctctttggggaatcctgggatggctctagccgttccgcagacgggatcgatttcatgattttttttgtttcgttgcatagggtttggtttgcccttttcctttatttcaatatatgccgtgcacttgtttgtcgggtcatcttttcatgcttttttttgtcttggttgtgatgatgtggtctggttgggcggtcgttctagatcggagtagaattctgtttcaaactacctggtggatttattaattttggatctgtatgtgtgtgccatacatattcatagttacgaattgaagatgatggatggaaatatcgatctaggataggtatacatgttgatgcgggttttactgatgcatatacagagatgctttttgttcgcttggttgtgatgatgtggtgtggttgggcggtcgttcattcgttctagatcggagtagaatactgtttcaaactacctggtgtatttattaattttggaactgtatgtgtgtgtcatacatcttcatagttacgagtttaagatggatggaaatatcgatctaggataggtatacatgttgatgtgggttttactgatgcatatacatgatggcatatgcagcatctattcatatgctctaaccttgagtacctatctattataataaacaagtatgttttataattattttgatcttgatatacttggatgatggcatatgcagcagctatatgtggatttttttagccctgccttcatacgctatttatttgcttggtactgtttcttttgtcgatgctcaccctgttgtttggtgttacttctgcaggtcgactctagaggatccatgagccgcttcaacctcctcgacgagccctggatcagcgtcatctacgacgagaagggcagcaccaaggacgtcagcctccaggacctcttcaccaacgcccaccagtacaaggagctcgccggcgacaccaagacccaggacttcgccgtcctcagggtcctcctcgccgtcctccacaccgtgttcagccgcttcgacatcgacggcaacgcctacgagtacctcaccatcgacgagggctggaaccagctcgagcccgtcgacgagatggacatcgagaactacgaggaggccctctatgaaacatgggagaagctctggaccaataaaagattccccaacatcgtcaatcaatacctcgagaagtggagggaccgcttctacctcttcgaccagaagtaccccttcttccaggtcaccaaggaggacatcgccggcgataaaattagcaaggccaagggcaccagcatcctcggcaaaaatataaatcgcatcatcagcgagagcggcaacaagatcgccctcttcagccccaaggacgaggaaaataaaaatactctcaccgccgccgagctcgccaggtggctcatcaccttccagggctacagcggcgtcagcgacaaggtcatcttcggcaatgaaaaatatacccccagcaagggctggctcttcgacatcggcgccatctacattaaaggcaacaccctcttcgaaaccctcctcctcaactacatcagcccctacaacgagtgcggcaatgtggaaaatatacagaggccctgctgggagaggaagagcagcgacatcattaaaagctacctcgatgaaaaagacatcaccaacatcgccagcctctacaccgtctggagcaagggcatctacatcgaccccgacttcaacctcaataaacccttcagcttcgacatcgtcaagctccccgacatcaaccaccgcgacaacttcctcgagcccatgaccctctggaagtacaacgtcagcggcaaaaatagggacagctacacccccaagaagcacctcctcaaccagagcctctggaggagcttcggcctcctgagcataaaagacaccgacctccagcacaggaagcccggcgtcatcgagtggctcacctacatcgacgatataataggcaacaggctcagcaacatcgtcgccatcagcatgcaggacgacggcaacccccagagcaggctgcccaccgacgaggtcatcgacagcatcttcatcaacgacctcgtcctcaccgacctcgacgagggcggctgggtccccaggatcaacgaggtcgtcgaggaaaccaagaagatcatcagcaggacatataaaacgtacattaatgatataaaggagatccgcaacatcagcaacggcagctacacccagcagatcgtcgagagcctctacttcaagatcgaccagcccttcaggcagtggctcgccagcatccagcccgaggacgacaaggacagcaagatccaggagtggcgcgtcctcctcaagaaaatagtcaaggccgaggccgaggtcatcctccaccagggcggcgccagggactacctcggcatccagaaggacggccgaattaagaacatcgccaccgcctacaacagcttcgacttctggctccgccagcagttaaaatagtcttcgtaagttaacctagacttgtccatcttctggattggccaacttaattaatgtatgaaataaaaggatgcacacatagtgacatgctaatcactataatgtgggcatcaaagttgtgtgttatgtgtaattactagttatctgaataaaagagaaagagatcatccatatttcttatcctaaatgaatgtcacgtgtctttataattctttgatgaaccagatgcatttcattaaccaaatccatatacatataaatattaatcatatataattaatatcaattgggttagcaaaacaaatctagtctaggtgtgttttgc

SEQ ID NO: 43 - DNA, 2928 bp, Artificial
  UBI  cse2 no NLS
gtgcagcgtgacccggtcgtgcccctctctagagataatgagcattgcatgtctaagttataaaaaattaccacatattttttttgtcacacttgtttgaagtgcagtttatctatctttatacatatatttaaactttactctacgaataatataatctatagtactacaataatatcagtgttttagagaatcatataaatgaacagttagacatggtctaaaggacaattgagtattttgacaacaggactctacagttttatctttttagtgtgcatgtgttctcctttttttttgcaaatagcttcacctatataatacttcatccattttattagtacatccatttagggtttagggttaatggtttttatagactaatttttttagtacatctattttattctattttagcctctaaattaagaaaactaaaactctattttagtttttttatttaataatttagatataaaatagaataaaataaagtgactaaaaattaaacaaataccctttaagaaattaaaaaaactaaggaaacatttttcttgtttcgagtagataatgccagcctgttaaacgccgtcgacgagtctaacggacaccaaccagcgaaccagcagcgtcgcgtcgggccaagcgaagcagacggcacggcatctctgtcgctgcctctggacccctctcgagagttccgctccaccgttggacttgctccgctgtcggcatccagaaattgcgtggcggagcggcagacgtgagccggcacggcaggcggcctcctcctcctctcacggcaccggcagctacgggggattcctttcccaccgctccttcgctttcccttcctcgcccgccgtaataaatagacaccccctccacaccctctttccccaacctcgtgttgttcggagcgcacacacacacaaccagatctcccccaaatccacccgtcggcacctccgcttcaaggtacgccgctcgtcctcccccccccccctctctaccttctctagatcggcgttccggtccatgcatggttagggcccggtagttctacttctgttcatgtttgtgttagatccgtgtttgtgttagatccgtgctgctagcgttcgtacacggatgcgacctgtacgtcagacacgttctgattgctaacttgccagtgtttctctttggggaatcctgggatggctctagccgttccgcagacgggatcgatttcatgattttttttgtttcgttgcatagggtttggtttgcccttttcctttatttcaatatatgccgtgcacttgtttgtcgggtcatcttttcatgcttttttttgtcttggttgtgatgatgtggtctggttgggcggtcgttctagatcggagtagaattctgtttcaaactacctggtggatttattaattttggatctgtatgtgtgtgccatacatattcatagttacgaattgaagatgatggatggaaatatcgatctaggataggtatacatgttgatgcgggttttactgatgcatatacagagatgctttttgttcgcttggttgtgatgatgtggtgtggttgggcggtcgttcattcgttctagatcggagtagaatactgtttcaaactacctggtgtatttattaattttggaactgtatgtgtgtgtcatacatcttcatagttacgagtttaagatggatggaaatatcgatctaggataggtatacatgttgatgtgggttttactgatgcatatacatgatggcatatgcagcatctattcatatgctctaaccttgagtacctatctattataataaacaagtatgttttataattattttgatcttgatatacttggatgatggcatatgcagcagctatatgtggatttttttagccctgccttcatacgctatttatttgcttggtactgtttcttttgtcgatgctcaccctgttgtttggtgttacttctgcaggtcgactctagaggatccatgagccagcatactaaacagaccgtctggaccgtcaccaagaagatcatcttcaagctcagcaaccaaaaggaggaaacctacgacaaggccaccctcgccaaggtcagaaagaccctcggcaagcccctcagcgaggccaccgagatctggcccatcctcttcgagaacctccccgaggagttcctcagcagctaccagcaaccaagctacgaggagctcgccatctacaccgccctccagctctacgccctccaccagcagggcgtcagcacctccgtcatgctggacgacagcaagccctatgaaaatataggcagcgccctcgggaagctgaggaaggaggacgacaccaccagcatcgacaggaggttcaacaccatgatcaccagcagcaccttcgaggagctcacctaccacctcaggcacctcatcagcctcctcaaggtcgagtcccccgtcatccaggtcgactacagcggcctcgccaacgacctctactggttcctcaataatagccaggagaacgtcaggctcaactgggcccgcgcctactacaagcaaattaaaggcgagaagaacaacgacaactagtcttcgtaagttaacctagacttgtccatcttctggattggccaacttaattaatgtatgaaataaaaggatgcacacatagtgacatgctaatcactataatgtgggcatcaaagttgtgtgttatgtgtaattactagttatctgaataaaagagaaagagatcatccatatttcttatcctaaatgaatgtcacgtgtctttataattctttgatgaaccagatgcatttcattaaccaaatccatatacatataaatattaatcatatataattaatatcaattgggttagcaaaacaaatctagtctaggtgtgttttgc

SEQ ID NO: 44 - DNA, 3096 bp, Artificial
  UBI  cas5 N terminal NLS
gtgcagcgtgacccggtcgtgcccctctctagagataatgagcattgcatgtctaagttataaaaaattaccacatattttttttgtcacacttgtttgaagtgcagtttatctatctttatacatatatttaaactttactctacgaataatataatctatagtactacaataatatcagtgttttagagaatcatataaatgaacagttagacatggtctaaaggacaattgagtattttgacaacaggactctacagttttatctttttagtgtgcatgtgttctcctttttttttgcaaatagcttcacctatataatacttcatccattttattagtacatccatttagggtttagggttaatggtttttatagactaatttttttagtacatctattttattctattttagcctctaaattaagaaaactaaaactctattttagtttttttatttaataatttagatataaaatagaataaaataaagtgactaaaaattaaacaaataccctttaagaaattaaaaaaactaaggaaacatttttcttgtttcgagtagataatgccagcctgttaaacgccgtcgacgagtctaacggacaccaaccagcgaaccagcagcgtcgcgtcgggccaagcgaagcagacggcacggcatctctgtcgctgcctctggacccctctcgagagttccgctccaccgttggacttgctccgctgtcggcatccagaaattgcgtggcggagcggcagacgtgagccggcacggcaggcggcctcctcctcctctcacggcaccggcagctacgggggattcctttcccaccgctccttcgctttcccttcctcgcccgccgtaataaatagacaccccctccacaccctctttccccaacctcgtgttgttcggagcgcacacacacacaaccagatctcccccaaatccacccgtcggcacctccgcttcaaggtacgccgctcgtcctcccccccccccctctctaccttctctagatcggcgttccggtccatgcatggttagggcccggtagttctacttctgttcatgtttgtgttagatccgtgtttgtgttagatccgtgctgctagcgttcgtacacggatgcgacctgtacgtcagacacgttctgattgctaacttgccagtgtttctctttggggaatcctgggatggctctagccgttccgcagacgggatcgatttcatgattttttttgtttcgttgcatagggtttggtttgcccttttcctttatttcaatatatgccgtgcacttgtttgtcgggtcatcttttcatgcttttttttgtcttggttgtgatgatgtggtctggttgggcggtcgttctagatcggagtagaattctgtttcaaactacctggtggatttattaattttggatctgtatgtgtgtgccatacatattcatagttacgaattgaagatgatggatggaaatatcgatctaggataggtatacatgttgatgcgggttttactgatgcatatacagagatgctttttgttcgcttggttgtgatgatgtggtgtggttgggcggtcgttcattcgttctagatcggagtagaatactgtttcaaactacctggtgtatttattaattttggaactgtatgtgtgtgtcatacatcttcatagttacgagtttaagatggatggaaatatcgatctaggataggtatacatgttgatgtgggttttactgatgcatatacatgatggcatatgcagcatctattcatatgctctaaccttgagtacctatctattataataaacaagtatgttttataattattttgatcttgatatacttggatgatggcatatgcagcagctatatgtggatttttttagccctgccttcatacgctatttatttgcttggtactgtttcttttgtcgatgctcaccctgttgtttggtgttacttctgcaggtcgactctagaggatccatggcccccaagaagaagcgcaaggtcatgaacgccatgaaaaccatcctcctcaagttcgccggccccctccagagctggggcaccagcagccacttcgaaacccgccacaccgacttctaccccagcaagagcgcggtcatcggcctcctcgccgccagcctcgggtacaggcgcgacgaggatgaaaaaatccagaaattaaatgagctcgacttcgccgtcagggtcgaccagcagggcaacctcctcagggacttccacgtcgcccagaagtacaccgagaagggcaagttcgaccgcaactacgtcaccaaccgctactacctcgaggacgccgtgttcgtcgtcgccctcagccacaccgacgacagcttcatcgacatcattaaaggcgccctcaagaacccctacttccagcccttcatgggcaggagggccctccccatcaccgccgacttcatcctcggcgaaaccgacgtcaaccccctcgagagcctgaagagcctcaagtggcaggccagcctctggttcatgaaaaagagccacgacaaggacgccatcagcctcgaggtctacctcgacagccagctcgtcaacaaggacgtctaccagctccgccaggactacgtccgcagcttcagccagaagggcaggaggttcggcttcaggtacgaggtccgcgaattaatcagcgtccagaacccccactacctcaacaagaatacagagcacaacatcttcgagagcatcggcgactagtcttcgtaagttaacctagacttgtccatcttctggattggccaacttaattaatgtatgaaataaaaggatgcacacatagtgacatgctaatcactataatgtgggcatcaaagttgtgtgttatgtgtaattactagttatctgaataaaagagaaagagatcatccatatttcttatcctaaatgaatgtcacgtgtctttataattctttgatgaaccagatgcatttcattaaccaaatccatatacatataaatattaatcatatataattaatatcaattgggttagcaaaacaaatctagtctaggtgtgttttgc

SEQ ID NO: 45 - DNA, 3102 bp, Artificial
  UBI  cas5 C terminal NLS
gtgcagcgtgacccggtcgtgcccctctctagagataatgagcattgcatgtctaagttataaaaaattaccacatattttttttgtcacacttgtttgaagtgcagtttatctatctttatacatatatttaaactttactctacgaataatataatctatagtactacaataatatcagtgttttagagaatcatataaatgaacagttagacatggtctaaaggacaattgagtattttgacaacaggactctacagttttatctttttagtgtgcatgtgttctcctttttttttgcaaatagcttcacctatataatacttcatccattttattagtacatccatttagggtttagggttaatggtttttatagactaatttttttagtacatctattttattctattttagcctctaaattaagaaaactaaaactctattttagtttttttatttaataatttagatataaaatagaataaaataaagtgactaaaaattaaacaaataccctttaagaaattaaaaaaactaaggaaacatttttcttgtttcgagtagataatgccagcctgttaaacgccgtcgacgagtctaacggacaccaaccagcgaaccagcagcgtcgcgtcgggccaagcgaagcagacggcacggcatctctgtcgctgcctctggacccctctcgagagttccgctccaccgttggacttgctccgctgtcggcatccagaaattgcgtggcggagcggcagacgtgagccggcacggcaggcggcctcctcctcctctcacggcaccggcagctacgggggattcctttcccaccgctccttcgctttcccttcctcgcccgccgtaataaatagacaccccctccacaccctctttccccaacctcgtgttgttcggagcgcacacacacacaaccagatctcccccaaatccacccgtcggcacctccgcttcaaggtacgccgctcgtcctcccccccccccctctctaccttctctagatcggcgttccggtccatgcatggttagggcccggtagttctacttctgttcatgtttgtgttagatccgtgtttgtgttagatccgtgctgctagcgttcgtacacggatgcgacctgtacgtcagacacgttctgattgctaacttgccagtgtttctctttggggaatcctgggatggctctagccgttccgcagacgggatcgatttcatgattttttttgtttcgttgcatagggtttggtttgcccttttcctttatttcaatatatgccgtgcacttgtttgtcgggtcatcttttcatgcttttttttgtcttggttgtgatgatgtggtctggttgggcggtcgttctagatcggagtagaattctgtttcaaactacctggtggatttattaattttggatctgtatgtgtgtgccatacatattcatagttacgaattgaagatgatggatggaaatatcgatctaggataggtatacatgttgatgcgggttttactgatgcatatacagagatgctttttgttcgcttggttgtgatgatgtggtgtggttgggcggtcgttcattcgttctagatcggagtagaatactgtttcaaactacctggtgtatttattaattttggaactgtatgtgtgtgtcatacatcttcatagttacgagtttaagatggatggaaatatcgatctaggataggtatacatgttgatgtgggttttactgatgcatatacatgatggcatatgcagcatctattcatatgctctaaccttgagtacctatctattataataaacaagtatgttttataattattttgatcttgatatacttggatgatggcatatgcagcagctatatgtggatttttttagccctgccttcatacgctatttatttgcttggtactgtttcttttgtcgatgctcaccctgttgtttggtgttacttctgcaggtcgactctagaggatccatgaacgccatgaaaaccatcctcctcaagttcgccggccccctccagagctggggcaccagcagccacttcgaaacccgccacaccgacttctaccccagcaagagcgcggtcatcggcctcctcgccgccagcctcgggtacaggcgcgacgaggatgaaaaaatccagaaattaaatgagctcgacttcgccgtcagggtcgaccagcagggcaacctcctcagggacttccacgtcgcccagaagtacaccgagaagggcaagttcgaccgcaactacgtcaccaaccgctactacctcgaggacgccgtgttcgtcgtcgccctcagccacaccgacgacagcttcatcgacatcattaaaggcgccctcaagaacccctacttccagcccttcatgggcaggagggccctccccatcaccgccgacttcatcctcggcgaaaccgacgtcaaccccctcgagagcctgaagagcctcaagtggcaggccagcctctggttcatgaaaaagagccacgacaaggacgccatcagcctcgaggtctacctcgacagccagctcgtcaacaaggacgtctaccagctccgccaggactacgtccgcagcttcagccagaagggcaggaggttcggcttcaggtacgaggtccgcgaattaatcagcgtccagaacccccactacctcaacaagaatacagagcacaacatcttcgagagcatcggcgacagcagggccgaccccaagaagaagaggaaggtgtagtcttcgtaagttaacctagacttgtccatcttctggattggccaacttaattaatgtatgaaataaaaggatgcacacatagtgacatgctaatcactataatgtgggcatcaaagttgtgtgttatgtgtaattactagttatctgaataaaagagaaagagatcatccatatttcttatcctaaatgaatgtcacgtgtctttataattctttgatgaaccagatgcatttcattaaccaaatccatatacatataaatattaatcatatataattaatatcaattgggttagcaaaacaaatctagtctaggtgtgttttgc

SEQ ID NO: 46 - DNA, 4029 bp, Artificial
  UBI  cse1 N terminal NLS
gtgcagcgtgacccggtcgtgcccctctctagagataatgagcattgcatgtctaagttataaaaaattaccacatattttttttgtcacacttgtttgaagtgcagtttatctatctttatacatatatttaaactttactctacgaataatataatctatagtactacaataatatcagtgttttagagaatcatataaatgaacagttagacatggtctaaaggacaattgagtattttgacaacaggactctacagttttatctttttagtgtgcatgtgttctcctttttttttgcaaatagcttcacctatataatacttcatccattttattagtacatccatttagggtttagggttaatggtttttatagactaatttttttagtacatctattttattctattttagcctctaaattaagaaaactaaaactctattttagtttttttatttaataatttagatataaaatagaataaaataaagtgactaaaaattaaacaaataccctttaagaaattaaaaaaactaaggaaacatttttcttgtttcgagtagataatgccagcctgttaaacgccgtcgacgagtctaacggacaccaaccagcgaaccagcagcgtcgcgtcgggccaagcgaagcagacggcacggcatctctgtcgctgcctctggacccctctcgagagttccgctccaccgttggacttgctccgctgtcggcatccagaaattgcgtggcggagcggcagacgtgagccggcacggcaggcggcctcctcctcctctcacggcaccggcagctacgggggattcctttcccaccgctccttcgctttcccttcctcgcccgccgtaataaatagacaccccctccacaccctctttccccaacctcgtgttgttcggagcgcacacacacacaaccagatctcccccaaatccacccgtcggcacctccgcttcaaggtacgccgctcgtcctcccccccccccctctctaccttctctagatcggcgttccggtccatgcatggttagggcccggtagttctacttctgttcatgtttgtgttagatccgtgtttgtgttagatccgtgctgctagcgttcgtacacggatgcgacctgtacgtcagacacgttctgattgctaacttgccagtgtttctctttggggaatcctgggatggctctagccgttccgcagacgggatcgatttcatgattttttttgtttcgttgcatagggtttggtttgcccttttcctttatttcaatatatgccgtgcacttgtttgtcgggtcatcttttcatgcttttttttgtcttggttgtgatgatgtggtctggttgggcggtcgttctagatcggagtagaattctgtttcaaactacctggtggatttattaattttggatctgtatgtgtgtgccatacatattcatagttacgaattgaagatgatggatggaaatatcgatctaggataggtatacatgttgatgcgggttttactgatgcatatacagagatgctttttgttcgcttggttgtgatgatgtggtgtggttgggcggtcgttcattcgttctagatcggagtagaatactgtttcaaactacctggtgtatttattaattttggaactgtatgtgtgtgtcatacatcttcatagttacgagtttaagatggatggaaatatcgatctaggataggtatacatgttgatgtgggttttactgatgcatatacatgatggcatatgcagcatctattcatatgctctaaccttgagtacctatctattataataaacaagtatgttttataattattttgatcttgatatacttggatgatggcatatgcagcagctatatgtggatttttttagccctgccttcatacgctatttatttgcttggtactgtttcttttgtcgatgctcaccctgttgtttggtgttacttctgcaggtcgactctagaggatccatggcccccaagaagaagcgcaaggtcatgagccgcttcaacctcctcgacgagccctggatcagcgtcatctacgacgagaagggcagcaccaaggacgtcagcctccaggacctcttcaccaacgcccaccagtacaaggagctcgccggcgacaccaagacccaggacttcgccgtcctcagggtcctcctcgccgtcctccacaccgtgttcagccgcttcgacatcgacggcaacgcctacgagtacctcaccatcgacgagggctggaaccagctcgagcccgtcgacgagatggacatcgagaactacgaggaggccctctatgaaacatgggagaagctctggaccaataaaagattccccaacatcgtcaatcaatacctcgagaagtggagggaccgcttctacctcttcgaccagaagtaccccttcttccaggtcaccaaggaggacatcgccggcgataaaattagcaaggccaagggcaccagcatcctcggcaaaaatataaatcgcatcatcagcgagagcggcaacaagatcgccctcttcagccccaaggacgaggaaaataaaaatactctcaccgccgccgagctcgccaggtggctcatcaccttccagggctacagcggcgtcagcgacaaggtcatcttcggcaatgaaaaatatacccccagcaagggctggctcttcgacatcggcgccatctacattaaaggcaacaccctcttcgaaaccctcctcctcaactacatcagcccctacaacgagtgcggcaatgtggaaaatatacagaggccctgctgggagaggaagagcagcgacatcattaaaagctacctcgatgaaaaagacatcaccaacatcgccagcctctacaccgtctggagcaagggcatctacatcgaccccgacttcaacctcaataaacccttcagcttcgacatcgtcaagctccccgacatcaaccaccgcgacaacttcctcgagcccatgaccctctggaagtacaacgtcagcggcaaaaatagggacagctacacccccaagaagcacctcctcaaccagagcctctggaggagcttcggcctcctgagcataaaagacaccgacctccagcacaggaagcccggcgtcatcgagtggctcacctacatcgacgatataataggcaacaggctcagcaacatcgtcgccatcagcatgcaggacgacggcaacccccagagcaggctgcccaccgacgaggtcatcgacagcatcttcatcaacgacctcgtcctcaccgacctcgacgagggcggctgggtccccaggatcaacgaggtcgtcgaggaaaccaagaagatcatcagcaggacatataaaacgtacattaatgatataaaggagatccgcaacatcagcaacggcagctacacccagcagatcgtcgagagcctctacttcaagatcgaccagcccttcaggcagtggctcgccagcatccagcccgaggacgacaaggacagcaagatccaggagtggcgcgtcctcctcaagaaaatagtcaaggccgaggccgaggtcatcctccaccagggcggcgccagggactacctcggcatccagaaggacggccgaattaagaacatcgccaccgcctacaacagcttcgacttctggctccgccagcagttaaaatagtcttcgtaagttaacctagacttgtccatcttctggattggccaacttaattaatgtatgaaataaaaggatgcacacatagtgacatgctaatcactataatgtgggcatcaaagttgtgtgttatgtgtaattactagttatctgaataaaagagaaagagatcatccatatttcttatcctaaatgaatgtcacgtgtctttataattctttgatgaaccagatgcatttcattaaccaaatccatatacatataaatattaatcatatataattaatatcaattgggttagcaaaacaaatctagtctaggtgtgttttgc

SEQ ID NO: 47 - DNA, 3006 bp, Artificial
  UBI  cas6 C terminal NLS
gtgcagcgtgacccggtcgtgcccctctctagagataatgagcattgcatgtctaagttataaaaaattaccacatattttttttgtcacacttgtttgaagtgcagtttatctatctttatacatatatttaaactttactctacgaataatataatctatagtactacaataatatcagtgttttagagaatcatataaatgaacagttagacatggtctaaaggacaattgagtattttgacaacaggactctacagttttatctttttagtgtgcatgtgttctcctttttttttgcaaatagcttcacctatataatacttcatccattttattagtacatccatttagggtttagggttaatggtttttatagactaatttttttagtacatctattttattctattttagcctctaaattaagaaaactaaaactctattttagtttttttatttaataatttagatataaaatagaataaaataaagtgactaaaaattaaacaaataccctttaagaaattaaaaaaactaaggaaacatttttcttgtttcgagtagataatgccagcctgttaaacgccgtcgacgagtctaacggacaccaaccagcgaaccagcagcgtcgcgtcgggccaagcgaagcagacggcacggcatctctgtcgctgcctctggacccctctcgagagttccgctccaccgttggacttgctccgctgtcggcatccagaaattgcgtggcggagcggcagacgtgagccggcacggcaggcggcctcctcctcctctcacggcaccggcagctacgggggattcctttcccaccgctccttcgctttcccttcctcgcccgccgtaataaatagacaccccctccacaccctctttccccaacctcgtgttgttcggagcgcacacacacacaaccagatctcccccaaatccacccgtcggcacctccgcttcaaggtacgccgctcgtcctcccccccccccctctctaccttctctagatcggcgttccggtccatgcatggttagggcccggtagttctacttctgttcatgtttgtgttagatccgtgtttgtgttagatccgtgctgctagcgttcgtacacggatgcgacctgtacgtcagacacgttctgattgctaacttgccagtgtttctctttggggaatcctgggatggctctagccgttccgcagacgggatcgatttcatgattttttttgtttcgttgcatagggtttggtttgcccttttcctttatttcaatatatgccgtgcacttgtttgtcgggtcatcttttcatgcttttttttgtcttggttgtgatgatgtggtctggttgggcggtcgttctagatcggagtagaattctgtttcaaactacctggtggatttattaattttggatctgtatgtgtgtgccatacatattcatagttacgaattgaagatgatggatggaaatatcgatctaggataggtatacatgttgatgcgggttttactgatgcatatacagagatgctttttgttcgcttggttgtgatgatgtggtgtggttgggcggtcgttcattcgttctagatcggagtagaatactgtttcaaactacctggtgtatttattaattttggaactgtatgtgtgtgtcatacatcttcatagttacgagtttaagatggatggaaatatcgatctaggataggtatacatgttgatgtgggttttactgatgcatatacatgatggcatatgcagcatctattcatatgctctaaccttgagtacctatctattataataaacaagtatgttttataattattttgatcttgatatacttggatgatggcatatgcagcagctatatgtggatttttttagccctgccttcatacgctatttatttgcttggtactgtttcttttgtcgatgctcaccctgttgtttggtgttacttctgcaggtcgactctagaggatccatgtacatcagcagggtcgagatcgaccgatataataggcgcaaggtcagggacctcacccacgtcggcgcctaccacgcctgggtcgaggagagcttccccagcgagctcgagcaatcaatcaggaccaggaagctctggcgcatcgaccgcatccagggcaaggactacctcatcatcgtcagcaaggagaagcccaacctccagaagctcgaaaaatatggcgtcgtcggcagcgcccagaccaaggactaccagcacttcctcgacagcatcaagaccggcttcaggatgaacttcaggatcgtcctcaaccccgtcatcagcatcaccagccccgacaaatcaaaacgcggcgtcgtcaagccccacgtcaccattaaacaccagatggacttcctcgtcaagcagagcgaaaaaaacggcttcagcctcgtcggcgagagcttctccatcgtcgagaggggctacgaggtgttccagaagcccgagaagcccatcaggctcagcaaggtcgtctacgagggcaccctcaccgtcagcgacgacacgctcttcaagaagatgctcaccgagggcgtcggcaagaagaaagcatatggcttcggcctcatgaccgtcgtccccctcgaggagagcagggccgaccccaagaagaagaggaaggtctagtcttcgtaagttaacctagacttgtccatcttctggattggccaacttaattaatgtatgaaataaaaggatgcacacatagtgacatgctaatcactataatgtgggcatcaaagttgtgtgttatgtgtaattactagttatctgaataaaagagaaagagatcatccatatttcttatcctaaatgaatgtcacgtgtctttataattctttgatgaaccagatgcatttcattaaccaaatccatatacatataaatattaatcatatataattaatatcaattgggttagcaaaacaaatctagtctaggtgtgttttgc

SEQ ID NO: 48 - DNA, 3435 bp, Artificial
  UBI  cas7 C terminal NLS
gtgcagcgtgacccggtcgtgcccctctctagagataatgagcattgcatgtctaagttataaaaaattaccacatattttttttgtcacacttgtttgaagtgcagtttatctatctttatacatatatttaaactttactctacgaataatataatctatagtactacaataatatcagtgttttagagaatcatataaatgaacagttagacatggtctaaaggacaattgagtattttgacaacaggactctacagttttatctttttagtgtgcatgtgttctcctttttttttgcaaatagcttcacctatataatacttcatccattttattagtacatccatttagggtttagggttaatggtttttatagactaatttttttagtacatctattttattctattttagcctctaaattaagaaaactaaaactctattttagtttttttatttaataatttagatataaaatagaataaaataaagtgactaaaaattaaacaaataccctttaagaaattaaaaaaactaaggaaacatttttcttgtttcgagtagataatgccagcctgttaaacgccgtcgacgagtctaacggacaccaaccagcgaaccagcagcgtcgcgtcgggccaagcgaagcagacggcacggcatctctgtcgctgcctctggacccctctcgagagttccgctccaccgttggacttgctccgctgtcggcatccagaaattgcgtggcggagcggcagacgtgagccggcacggcaggcggcctcctcctcctctcacggcaccggcagctacgggggattcctttcccaccgctccttcgctttcccttcctcgcccgccgtaataaatagacaccccctccacaccctctttccccaacctcgtgttgttcggagcgcacacacacacaaccagatctcccccaaatccacccgtcggcacctccgcttcaaggtacgccgctcgtcctcccccccccccctctctaccttctctagatcggcgttccggtccatgcatggttagggcccggtagttctacttctgttcatgtttgtgttagatccgtgtttgtgttagatccgtgctgctagcgttcgtacacggatgcgacctgtacgtcagacacgttctgattgctaacttgccagtgtttctctttggggaatcctgggatggctctagccgttccgcagacgggatcgatttcatgattttttttgtttcgttgcatagggtttggtttgcccttttcctttatttcaatatatgccgtgcacttgtttgtcgggtcatcttttcatgcttttttttgtcttggttgtgatgatgtggtctggttgggcggtcgttctagatcggagtagaattctgtttcaaactacctggtggatttattaattttggatctgtatgtgtgtgccatacatattcatagttacgaattgaagatgatggatggaaatatcgatctaggataggtatacatgttgatgcgggttttactgatgcatatacagagatgctttttgttcgcttggttgtgatgatgtggtgtggttgggcggtcgttcattcgttctagatcggagtagaatactgtttcaaactacctggtgtatttattaattttggaactgtatgtgtgtgtcatacatcttcatagttacgagtttaagatggatggaaatatcgatctaggataggtatacatgttgatgtgggttttactgatgcatatacatgatggcatatgcagcatctattcatatgctctaaccttgagtacctatctattataataaacaagtatgttttataattattttgatcttgatatacttggatgatggcatatgcagcagctatatgtggatttttttagccctgccttcatacgctatttatttgcttggtactgtttcttttgtcgatgctcaccctgttgtttggtgttacttctgcaggtcgactctagaggatccatgaccaccgagcagcgcctcttcctcgacatccacgccatccagagcctcccccccagcaacatgaacagggacgacaccggcagccccaagaccgcccagtacggcggcgtcaggaggagcagagtctcgtcccaagcatggaagaaggccatgagggagtacttcaacacccacggcgaccactcaaacgtcggcatccgcaccaaggagatcgtccgctacgtcgccgataaaatagtcgagctcgacagcagcatcagcatcgaggacgccctcgagaaggcggacaaggtcctcatcgccgccggaatcaagaagaagggcgaggtcaaggccctctacttcatgggcgacagccaggccaagaagctcgcccaggccgcctacgacaatataacacataaaaaagaactccagaagctcgcgaacgaggaccccgccatcgacatcgccctcttcggcaggatggtcgccgaggaccccaccctgaacgaggactccagcagccaggtcgcccacgcgatcagcacccaccccgtccagacggagttcgacttcttcaccgccgtcgacgacctcgcccccgaggacaacgccggcgccggcatgctcggcacggtcgagttcaacagcagcacgctctacaggtacgccaacgtcgccatccacgagctcagcaagcagctcggcaacaaggagagcctcgagaacagcctcagcctcttcatcgaggccttcgccaagagcctccccaccggcaaggtcaatacatttgccaatcaaaccctcccccagaccctcatcgtcaccgtgaggagcgacaggcccgtcaacctcgtctccgcgttcgaagagcccgtcaaatcaatagagggctacgtcaccaagagcatcgacaagctcgccaaggagttcatcaaggtcgagaagttcgtcgacaagcccctcatgaccttctacgtcaccctccacgagagcgacagcctcaagcagatcggcgaggagaaggacagcgtcagcaagctcctcgaggacttcagcgagatgatcgcccagtacatcagccgcgccgaccccaagaagaagcgcaaggtctagtcttcgtaagttaacctagacttgtccatcttctggattggccaacttaattaatgtatgaaataaaaggatgcacacatagtgacatgctaatcactataatgtgggcatcaaagttgtgtgttatgtgtaattactagttatctgaataaaagagaaagagatcatccatatttcttatcctaaatgaatgtcacgtgtctttataattctttgatgaaccagatgcatttcattaaccaaatccatatacatataaatattaatcatatataattaatatcaattgggttagcaaaacaaatctagtctaggtgtgttttgc

SEQ ID NO: 49 - DNA, 2961 bp, Artificial
  UBI  cse2 C terminal NLS
gtgcagcgtgacccggtcgtgcccctctctagagataatgagcattgcatgtctaagttataaaaaattaccacatattttttttgtcacacttgtttgaagtgcagtttatctatctttatacatatatttaaactttactctacgaataatataatctatagtactacaataatatcagtgttttagagaatcatataaatgaacagttagacatggtctaaaggacaattgagtattttgacaacaggactctacagttttatctttttagtgtgcatgtgttctcctttttttttgcaaatagcttcacctatataatacttcatccattttattagtacatccatttagggtttagggttaatggtttttatagactaatttttttagtacatctattttattctattttagcctctaaattaagaaaactaaaactctattttagtttttttatttaataatttagatataaaatagaataaaataaagtgactaaaaattaaacaaataccctttaagaaattaaaaaaactaaggaaacatttttcttgtttcgagtagataatgccagcctgttaaacgccgtcgacgagtctaacggacaccaaccagcgaaccagcagcgtcgcgtcgggccaagcgaagcagacggcacggcatctctgtcgctgcctctggacccctctcgagagttccgctccaccgttggacttgctccgctgtcggcatccagaaattgcgtggcggagcggcagacgtgagccggcacggcaggcggcctcctcctcctctcacggcaccggcagctacgggggattcctttcccaccgctccttcgctttcccttcctcgcccgccgtaataaatagacaccccctccacaccctctttccccaacctcgtgttgttcggagcgcacacacacacaaccagatctcccccaaatccacccgtcggcacctccgcttcaaggtacgccgctcgtcctcccccccccccctctctaccttctctagatcggcgttccggtccatgcatggttagggcccggtagttctacttctgttcatgtttgtgttagatccgtgtttgtgttagatccgtgctgctagcgttcgtacacggatgcgacctgtacgtcagacacgttctgattgctaacttgccagtgtttctctttggggaatcctgggatggctctagccgttccgcagacgggatcgatttcatgattttttttgtttcgttgcatagggtttggtttgcccttttcctttatttcaatatatgccgtgcacttgtttgtcgggtcatcttttcatgcttttttttgtcttggttgtgatgatgtggtctggttgggcggtcgttctagatcggagtagaattctgtttcaaactacctggtggatttattaattttggatctgtatgtgtgtgccatacatattcatagttacgaattgaagatgatggatggaaatatcgatctaggataggtatacatgttgatgcgggttttactgatgcatatacagagatgctttttgttcgcttggttgtgatgatgtggtgtggttgggcggtcgttcattcgttctagatcggagtagaatactgtttcaaactacctggtgtatttattaattttggaactgtatgtgtgtgtcatacatcttcatagttacgagtttaagatggatggaaatatcgatctaggataggtatacatgttgatgtgggttttactgatgcatatacatgatggcatatgcagcatctattcatatgctctaaccttgagtacctatctattataataaacaagtatgttttataattattttgatcttgatatacttggatgatggcatatgcagcagctatatgtggatttttttagccctgccttcatacgctatttatttgcttggtactgtttcttttgtcgatgctcaccctgttgtttggtgttacttctgcaggtcgactctagaggatccatgagccagcatactaaacagaccgtctggaccgtcaccaagaagatcatcttcaagctcagcaaccaaaaggaggaaacctacgacaaggccaccctcgccaaggtcagaaagaccctcggcaagcccctcagcgaggccaccgagatctggcccatcctcttcgagaacctccccgaggagttcctcagcagctaccagcaaccaagctacgaggagctcgccatctacaccgccctccagctctacgccctccaccagcagggcgtcagcacctccgtcatgctggacgacagcaagccctatgaaaatataggcagcgccctcgggaagctgaggaaggaggacgacaccaccagcatcgacaggaggttcaacaccatgatcaccagcagcaccttcgaggagctcacctaccacctcaggcacctcatcagcctcctcaaggtcgagtcccccgtcatccaggtcgactacagcggcctcgccaacgacctctactggttcctcaataatagccaggagaacgtcaggctcaactgggcccgcgcctactacaagcaaattaaaggcgagaagaacaacgacaacagccgcgccgaccccaagaagaagaggaaggtctagtcttcgtaagttaacctagacttgtccatcttctggattggccaacttaattaatgtatgaaataaaaggatgcacacatagtgacatgctaatcactataatgtgggcatcaaagttgtgtgttatgtgtaattactagttatctgaataaaagagaaagagatcatccatatttcttatcctaaatgaatgtcacgtgtctttataattctttgatgaaccagatgcatttcattaaccaaatccatatacatataaatattaatcatatataattaatatcaattgggttagcaaaacaaatctagtctaggtgtgttttgc

SEQ ID NO: 50 - DNA, 294 bp, Arabidopsis thaliana
acatgcgccaaggatatccaaaaagcggctgctgaagcggcgttggcttttcaagatgagacgtgtgatacgacgaccacgaatcatggcctggacatggaggagacgatggtggaagctatttatacaccggaacagagcgaaggtgcgttttatatggatgaggagacaatgtttgggatgccgactttgttggataatatggctgaaggcatgcttttaccgccgccgtctgttcaatggaatcataattatgacggcgaaggagatggtgacgtgtcgctttggagttac

SEQ ID NO: 51 - DNA, 1164 bp, Artificial
  cas5 gene with N-terminal NLS linked by 30XQ to AtCBF1 motif
atgacctgcgccaaggatatccaaaaggccgccgccgaggccgctcttgccttccaggacgaaacctgcgataccaccaccaccaaccacggactcgacatggaggagacgatggtcgaggccatctacacccccgagcaatccgagggcgccttctacatggacgaggaaaccatgttcggcatgcccaccctcctcgacaacatggccgagggaatgctcctccccccccccagcgtccaatggaaccacaactacgatggggagggagacggcgatgtgtccctttggagctaccagcagcagcagcagcaacagcagcagcagcagcagcagcaacagcagcagcagcagcagcagcaacagcagcagcagcagcagcagcagagcagctccggcggaatggctcccaagaagaagaggaaggtcatgaacgccatgaaaaccatcctcctcaagttcgccggccccctccagagctggggcaccagcagccacttcgaaacccgccacaccgacttctaccccagcaagagcgcggtcatcggcctcctcgccgccagcctcgggtacaggcgcgacgaggatgaaaaaatccagaaattaaatgagctcgacttcgccgtcagggtcgaccagcagggcaacctcctcagggacttccacgtcgcccagaagtacaccgagaagggcaagttcgaccgcaactacgtcaccaaccgctactacctcgaggacgccgtgttcgtcgtcgccctcagccacaccgacgacagcttcatcgacatcattaaaggcgccctcaagaacccctacttccagcccttcatgggcaggagggccctccccatcaccgccgacttcatcctcggcgaaaccgacgtcaaccccctcgagagcctgaagagcctcaagtggcaggccagcctctggttcatgaaaaagagccacgacaaggacgccatcagcctcgaggtctacctcgacagccagctcgtcaacaaggacgtctaccagctccgccaggactacgtccgcagcttcagccagaagggcaggaggttcggcttcaggtacgaggtccgcgaattaatcagcgtccagaacccccactacctcaacaagaatacagagcacaacatcttcgagagcatcggcgactag

SEQ ID NO: 52 - DNA, 1068 bp, Artificial
  cas5 gene with N-terminal NLS linked by GRA to AtCBF1 motif
atgacctgtgcaaaggacatccagaaggcagccgccgaggcggcgcttgcattccaggacgaaacctgcgacaccaccaccaccaaccacggactggacatggaggagacgatggtcgaggcaatctacacccccgagcagagcgagggcgccttctacatggacgaggaaaccatgttcggcatgcccaccctcctcgacaacatggcagaggggatgctcctcccccccccgagcgtccagtggaaccacaattacgacggagagggagacggcgacgtcagcctttggtcgtatgcacggggaatggcgcccaagaagaagaggaaggtcatgaacgccatgaaaaccatcctcctcaagttcgccggccccctccagagctggggcaccagcagccacttcgaaacccgccacaccgacttctaccccagcaagagcgcggtcatcggcctcctcgccgccagcctcgggtacaggcgcgacgaggatgaaaaaatccagaaattaaatgagctcgacttcgccgtcagggtcgaccagcagggcaacctcctcagggacttccacgtcgcccagaagtacaccgagaagggcaagttcgaccgcaactacgtcaccaaccgctactacctcgaggacgccgtgttcgtcgtcgccctcagccacaccgacgacagcttcatcgacatcattaaaggcgccctcaagaacccctacttccagcccttcatgggcaggagggccctccccatcaccgccgacttcatcctcggcgaaaccgacgtcaaccccctcgagagcctgaagagcctcaagtggcaggccagcctctggttcatgaaaaagagccacgacaaggacgccatcagcctcgaggtctacctcgacagccagctcgtcaacaaggacgtctaccagctccgccaggactacgtccgcagcttcagccagaagggcaggaggttcggcttcaggtacgaggtccgcgaattaatcagcgtccagaacccccactacctcaacaagaatacagagcacaacatcttcgagagcatcggcgactag

SEQ ID NO: 53 - DNA, 1167 bp, Artificial
  cas5 gene with C-terminal NLS linked by 30XQ to AtCBF1 motif
atgaacgccatgaaaaccatcctcctcaagttcgccggccccctccagagctggggcaccagcagccacttcgaaacccgccacaccgacttctaccccagcaagagcgcggtcatcggcctcctcgccgccagcctcgggtacaggcgcgacgaggatgaaaaaatccagaaattaaatgagctcgacttcgccgtcagggtcgaccagcagggcaacctcctcagggacttccacgtcgcccagaagtacaccgagaagggcaagttcgaccgcaactacgtcaccaaccgctactacctcgaggacgccgtgttcgtcgtcgccctcagccacaccgacgacagcttcatcgacatcattaaaggcgccctcaagaacccctacttccagcccttcatgggcaggagggccctccccatcaccgccgacttcatcctcggcgaaaccgacgtcaaccccctcgagagcctgaagagcctcaagtggcaggccagcctctggttcatgaaaaagagccacgacaaggacgccatcagcctcgaggtctacctcgacagccagctcgtcaacaaggacgtctaccagctccgccaggactacgtccgcagcttcagccagaagggcaggaggttcggcttcaggtacgaggtccgcgaattaatcagcgtccagaacccccactacctcaacaagaatacagagcacaacatcttcgagagcatcggcgacagcagggccgaccccaagaagaagaggaaggtgggcggctcttcaagccaacagcagcagcagcagcagcagcaacagcagcagcagcagcagcagcaacagcagcagcagcagcagcagcaacagcagcagcagcagacctgcgcaaaggacatccagaaggccgcggcagaggccgcgctggcttttcaggacgaaacctgcgacaccaccaccaccaaccacggcctcgacatggaggaaacgatggtggaggcgatttacaccccagaacagtctgagggcgccttctacatggacgaggaaaccatgttcggcatgccaaccctcctcgacaacatggccgagggcatgctcctcccaccgccgtctgtccagtggaatcacaactacgacggcgaaggcgacggcgacgtcagcctctggagctactag

SEQ ID NO: 54 - DNA, 1071 bp, Artificial
  cas5 gene with C-terminal NLS linked by GRA to AtCBF1 motif
atgaacgccatgaaaaccatcctcctcaagttcgccggccccctccagagctggggcaccagcagccacttcgaaacccgccacaccgacttctaccccagcaagagcgcggtcatcggcctcctcgccgccagcctcgggtacaggcgcgacgaggatgaaaaaatccagaaattaaatgagctcgacttcgccgtcagggtcgaccagcagggcaacctcctcagggacttccacgtcgcccagaagtacaccgagaagggcaagttcgaccgcaactacgtcaccaaccgctactacctcgaggacgccgtgttcgtcgtcgccctcagccacaccgacgacagcttcatcgacatcattaaaggcgccctcaagaacccctacttccagcccttcatgggcaggagggccctccccatcaccgccgacttcatcctcggcgaaaccgacgtcaaccccctcgagagcctgaagagcctcaagtggcaggccagcctctggttcatgaaaaagagccacgacaaggacgccatcagcctcgaggtctacctcgacagccagctcgtcaacaaggacgtctaccagctccgccaggactacgtccgcagcttcagccagaagggcaggaggttcggcttcaggtacgaggtccgcgaattaatcagcgtccagaacccccactacctcaacaagaatacagagcacaacatcttcgagagcatcggcgacagcagggccgaccccaagaagaagaggaaggtgggtcgggcgacatgtgccaaggacatccagaaggccgctgccgaagcggcgctcgcttttcaggacgaaacctgcgacaccaccaccaccaaccacggcctcgacatggaggaaacaatggtggaggccatctacacgcctgaacagagcgagggggctttctacatggacgaggaaaccatgttcggcatgcccacactcctcgacaacatggccgagggcatgctcctcccccccccgagcgtccagtggaaccacaactacgacggcgaaggcgacggcgacgtcagcctctggtcctactag

SEQ ID NO: 55 - DNA, 2097 bp, Artificial
  cse1 gene with N-terminal NLS linked by 30XQ to AtCBF1 motif
atgacctgcgccaaggatatccaaaaggccgccgccgaggccgctcttgccttccaggacgaaacctgcgataccaccaccaccaaccacggactcgacatggaggagacgatggtcgaggccatctacacccccgagcaatccgagggcgccttctacatggacgaggaaaccatgttcggcatgcccaccctcctcgacaacatggccgagggaatgctcctccccccccccagcgtccaatggaaccacaactacgatggggagggagacggcgatgtgtccctttggagctaccagcagcagcagcagcaacagcagcagcagcagcagcagcaacagcagcagcagcagcagcagcaacagcagcagcagcagcagcagcagagcagctccggcggaatggctcccaagaagaagaggaaggtcatgagccgcttcaacctcctcgacgagccctggatcagcgtcatctacgacgagaagggcagcaccaaggacgtcagcctccaggacctcttcaccaacgcccaccagtacaaggagctcgccggcgacaccaagacccaggacttcgccgtcctcagggtcctcctcgccgtcctccacaccgtgttcagccgcttcgacatcgacggcaacgcctacgagtacctcaccatcgacgagggctggaaccagctcgagcccgtcgacgagatggacatcgagaactacgaggaggccctctatgaaacatgggagaagctctggaccaataaaagattccccaacatcgtcaatcaatacctcgagaagtggagggaccgcttctacctcttcgaccagaagtaccccttcttccaggtcaccaaggaggacatcgccggcgataaaattagcaaggccaagggcaccagcatcctcggcaaaaatataaatcgcatcatcagcgagagcggcaacaagatcgccctcttcagccccaaggacgaggaaaataaaaatactctcaccgccgccgagctcgccaggtggctcatcaccttccagggctacagcggcgtcagcgacaaggtcatcttcggcaatgaaaaatatacccccagcaagggctggctcttcgacatcggcgccatctacattaaaggcaacaccctcttcgaaaccctcctcctcaactacatcagcccctacaacgagtgcggcaatgtggaaaatatacagaggccctgctgggagaggaagagcagcgacatcattaaaagctacctcgatgaaaaagacatcaccaacatcgccagcctctacaccgtctggagcaagggcatctacatcgaccccgacttcaacctcaataaacccttcagcttcgacatcgtcaagctccccgacatcaaccaccgcgacaacttcctcgagcccatgaccctctggaagtacaacgtcagcggcaaaaatagggacagctacacccccaagaagcacctcctcaaccagagcctctggaggagcttcggcctcctgagcataaaagacaccgacctccagcacaggaagcccggcgtcatcgagtggctcacctacatcgacgatataataggcaacaggctcagcaacatcgtcgccatcagcatgcaggacgacggcaacccccagagcaggctgcccaccgacgaggtcatcgacagcatcttcatcaacgacctcgtcctcaccgacctcgacgagggcggctgggtccccaggatcaacgaggtcgtcgaggaaaccaagaagatcatcagcaggacatataaaacgtacattaatgatataaaggagatccgcaacatcagcaacggcagctacacccagcagatcgtcgagagcctctacttcaagatcgaccagcccttcaggcagtggctcgccagcatccagcccgaggacgacaaggacagcaagatccaggagtggcgcgtcctcctcaagaaaatagtcaaggccgaggccgaggtcatcctccaccagggcggcgccagggactacctcggcatccagaaggacggccgaattaagaacatcgccaccgcctacaacagcttcgacttctggctccgccagcagttaaaatag

SEQ ID NO: 56 - DNA, 2001 bp, Artificial
  cse1 gene with N-terminal NLS linked by GRA to AtCBF1 motif
atgacctgtgcaaaggacatccagaaggcagccgccgaggcggcgcttgcattccaggacgaaacctgcgacaccaccaccaccaaccacggactggacatggaggagacgatggtcgaggcaatctacacccccgagcagagcgagggcgccttctacatggacgaggaaaccatgttcggcatgcccaccctcctcgacaacatggcagaggggatgctcctcccccccccgagcgtccagtggaaccacaattacgacggagagggagacggcgacgtcagcctttggtcgtatgcacggggaatggcgcccaagaagaagaggaaggtcatgagccgcttcaacctcctcgacgagccctggatcagcgtcatctacgacgagaagggcagcaccaaggacgtcagcctccaggacctcttcaccaacgcccaccagtacaaggagctcgccggcgacaccaagacccaggacttcgccgtcctcagggtcctcctcgccgtcctccacaccgtgttcagccgcttcgacatcgacggcaacgcctacgagtacctcaccatcgacgagggctggaaccagctcgagcccgtcgacgagatggacatcgagaactacgaggaggccctctatgaaacatgggagaagctctggaccaataaaagattccccaacatcgtcaatcaatacctcgagaagtggagggaccgcttctacctcttcgaccagaagtaccccttcttccaggtcaccaaggaggacatcgccggcgataaaattagcaaggccaagggcaccagcatcctcggcaaaaatataaatcgcatcatcagcgagagcggcaacaagatcgccctcttcagccccaaggacgaggaaaataaaaatactctcaccgccgccgagctcgccaggtggctcatcaccttccagggctacagcggcgtcagcgacaaggtcatcttcggcaatgaaaaatatacccccagcaagggctggctcttcgacatcggcgccatctacattaaaggcaacaccctcttcgaaaccctcctcctcaactacatcagcccctacaacgagtgcggcaatgtggaaaatatacagaggccctgctgggagaggaagagcagcgacatcattaaaagctacctcgatgaaaaagacatcaccaacatcgccagcctctacaccgtctggagcaagggcatctacatcgaccccgacttcaacctcaataaacccttcagcttcgacatcgtcaagctccccgacatcaaccaccgcgacaacttcctcgagcccatgaccctctggaagtacaacgtcagcggcaaaaatagggacagctacacccccaagaagcacctcctcaaccagagcctctggaggagcttcggcctcctgagcataaaagacaccgacctccagcacaggaagcccggcgtcatcgagtggctcacctacatcgacgatataataggcaacaggctcagcaacatcgtcgccatcagcatgcaggacgacggcaacccccagagcaggctgcccaccgacgaggtcatcgacagcatcttcatcaacgacctcgtcctcaccgacctcgacgagggcggctgggtccccaggatcaacgaggtcgtcgaggaaaccaagaagatcatcagcaggacatataaaacgtacattaatgatataaaggagatccgcaacatcagcaacggcagctacacccagcagatcgtcgagagcctctacttcaagatcgaccagcccttcaggcagtggctcgccagcatccagcccgaggacgacaaggacagcaagatccaggagtggcgcgtcctcctcaagaaaatagtcaaggccgaggccgaggtcatcctccaccagggcggcgccagggactacctcggcatccagaaggacggccgaattaagaacatcgccaccgcctacaacagcttcgacttctggctccgccagcagttaaaatag

SEQ ID NO: 57 - protein, 387 aa, Artificial
  protein of  cas5 gene with N-terminal NLS linked by 30XQ to AtCBF1 motif
MTCAKDIQKAAAEAALAFQDETCDTTTTNHGLDMEETMVEAIYTPEQSEGAFYMDEETMFGMPTLLDNMAEGMLLPPPSVQWNHNYDGEGDGDVSLWSYQQQQQQQQQQQQQQQQQQQQQQQQQQQQQQSSSGGMAPKKKRKVMNAMKTILLKFAGPLQSWGTSSHFETRHTDFYPSKSAVIGLLAASLGYRRDEDEKIQKLNELDFAVRVDQQGNLLRDFHVAQKYTEKGKFDRNYVTNRYYLEDAVFVVALSHTDDSFIDIIKGALKNPYFQPFMGRRALPITADFILGETDVNPLESLKSLKWQASLWFMKKSHDKDAISLEVYLDSQLVNKDVYQLRQDYVRSFSQKGRRFGFRYEVRELISVQNPHYLNKNTEHNIFESIGD

SEQ ID NO: 58 - protein, 355 aa, Artificial
  protein of  cas5 gene with N-terminal NLS linked by GRA to AtCBF1 motif
MTCAKDIQKAAAEAALAFQDETCDTTTTNHGLDMEETMVEAIYTPEQSEGAFYMDEETMFGMPTLLDNMAEGMLLPPPSVQWNHNYDGEGDGDVSLWSYARGMAPKKKRKVMNAMKTILLKFAGPLQSWGTSSHFETRHTDFYPSKSAVIGLLAASLGYRRDEDEKIQKLNELDFAVRVDQQGNLLRDFHVAQKYTEKGKFDRNYVTNRYYLEDAVFVVALSHTDDSFIDIIKGALKNPYFQPFMGRRALPITADFILGETDVNPLESLKSLKWQASLWFMKKSHDKDAISLEVYLDSQLVNKDVYQLRQDYVRSFSQKGRRFGFRYEVRELISVQNPHYLNKNTEHNIFESIGD

SEQ ID NO: 59 - protein, 388 aa, Artificial
  protein of  cas5 gene with C-terminal NLS linked by 30XQ to AtCBF1 motif
MNAMKTILLKFAGPLQSWGTSSHFETRHTDFYPSKSAVIGLLAASLGYRRDEDEKIQKLNELDFAVRVDQQGNLLRDFHVAQKYTEKGKFDRNYVTNRYYLEDAVFVVALSHTDDSFIDIIKGALKNPYFQPFMGRRALPITADFILGETDVNPLESLKSLKWQASLWFMKKSHDKDAISLEVYLDSQLVNKDVYQLRQDYVRSFSQKGRRFGFRYEVRELISVQNPHYLNKNTEHNIFESIGDSRADPKKKRKVGGSSSQQQQQQQQQQQQQQQQQQQQQQQQQQQQQQTCAKDIQKAAAEAALAFQDETCDTTTTNHGLDMEETMVEAIYTPEQSEGAFYMDEETMFGMPTLLDNMAEGMLLPPPSVQWNHNYDGEGDGDVSLWSY

SEQ ID NO: 60 - protein, 356 aa, Artificial
  protein of  cas5 gene with C-terminal NLS linked by GRA to AtCBF1 motif
MNAMKTILLKFAGPLQSWGTSSHFETRHTDFYPSKSAVIGLLAASLGYRRDEDEKIQKLNELDFAVRVDQQGNLLRDFHVAQKYTEKGKFDRNYVTNRYYLEDAVFVVALSHTDDSFIDIIKGALKNPYFQPFMGRRALPITADFILGETDVNPLESLKSLKWQASLWFMKKSHDKDAISLEVYLDSQLVNKDVYQLRQDYVRSFSQKGRRFGFRYEVRELISVQNPHYLNKNTEHNIFESIGDSRADPKKKRKVGRATCAKDIQKAAAEAALAFQDETCDTTTTNHGLDMEETMVEAIYTPEQSEGAFYMDEETMFGMPTLLDNMAEGMLLPPPSVQWNHNYDGEGDGDVSLWSY

SEQ ID NO: 61 - protein, 698 aa, Artificial
  protein of  cse1 gene with N-terminal NLS linked by 30XQ to AtCBF1 motif
MTCAKDIQKAAAEAALAFQDETCDTTTTNHGLDMEETMVEAIYTPEQSEGAFYMDEETMFGMPTLLDNMAEGMLLPPPSVQWNHNYDGEGDGDVSLWSYQQQQQQQQQQQQQQQQQQQQQQQQQQQQQQSSSGGMAPKKKRKVMSRFNLLDEPWISVIYDEKGSTKDVSLQDLFTNAHQYKELAGDTKTQDFAVLRVLLAVLHTVFSRFDIDGNAYEYLTIDEGWNQLEPVDEMDIENYEEALYETWEKLWTNKRFPNIVNQYLEKWRDRFYLFDQKYPFFQVTKEDIAGDKISKAKGTSILGKNINRIISESGNKIALFSPKDEENKNTLTAAELARWLITFQGYSGVSDKVIFGNEKYTPSKGWLFDIGAIYIKGNTLFETLLLNYISPYNECGNVENIQRPCWERKSSDIIKSYLDEKDITNIASLYTVWSKGIYIDPDFNLNKPFSFDIVKLPDINHRDNFLEPMTLWKYNVSGKNRDSYTPKKHLLNQSLWRSFGLLSIKDTDLQHRKPGVIEWLTYIDDIIGNRLSNIVAISMQDDGNPQSRLPTDEVIDSIFINDLVLTDLDEGGWVPRINEVVEETKKIISRTYKTYINDIKEIRNISNGSYTQQIVESLYFKIDQPFRQWLASIQPEDDKDSKIQEWRVLLKKIVKAEAEVILHQGGARDYLGIQKDGRIKNIATAYNSFDFWLRQQLK

SEQ ID NO: 62 - protein, 666 aa, Artificial
  protein of  cse1 gene with N-terminal NLS linked by GRA to AtCBF1 motif
MTCAKDIQKAAAEAALAFQDETCDTTTTNHGLDMEETMVEAIYTPEQSEGAFYMDEETMFGMPTLLDNMAEGMLLPPPSVQWNHNYDGEGDGDVSLWSYARGMAPKKKRKVMSRFNLLDEPWISVIYDEKGSTKDVSLQDLFTNAHQYKELAGDTKTQDFAVLRVLLAVLHTVFSRFDIDGNAYEYLTIDEGWNQLEPVDEMDIENYEEALYETWEKLWTNKRFPNIVNQYLEKWRDRFYLFDQKYPFFQVTKEDIAGDKISKAKGTSILGKNINRIISESGNKIALFSPKDEENKNTLTAAELARWLITFQGYSGVSDKVIFGNEKYTPSKGWLFDIGAIYIKGNTLFETLLLNYISPYNECGNVENIQRPCWERKSSDIIKSYLDEKDITNIASLYTVWSKGIYIDPDFNLNKPFSFDIVKLPDINHRDNFLEPMTLWKYNVSGKNRDSYTPKKHLLNQSLWRSFGLLSIKDTDLQHRKPGVIEWLTYIDDIIGNRLSNIVAISMQDDGNPQSRLPTDEVIDSIFINDLVLTDLDEGGWVPRINEVVEETKKIISRTYKTYINDIKEIRNISNGSYTQQIVESLYFKIDQPFRQWLASIQPEDDKDSKIQEWRVLLKKIVKAEAEVILHQGGARDYLGIQKDGRIKNIATAYNSFDFWLRQQLK

SEQ ID NO: 63 - DNA, 4377 bp, Artificial
  Spy cas9 gene
atggcaccgaagaagaagcgcaaggtgatggacaagaagtacagcatcggcctcgacatcggcaccaactcggtgggctgggccgtcatcacggacgaatataaggtcccgtcgaagaagttcaaggtcctcggcaatacagaccgccacagcatcaagaaaaacttgatcggcgccctcctgttcgatagcggcgagaccgcggaggcgaccaggctcaagaggaccgccaggagacggtacactaggcgcaagaacaggatctgctacctgcaggagatcttcagcaacgagatggcgaaggtggacgactccttcttccaccgcctggaggaatcattcctggtggaggaggacaagaagcatgagcggcacccaatcttcggcaacatcgtcgacgaggtaagtttctgcttctacctttgatatatatataataattatcattaattagtagtaatataatatttcaaatatttttttcaaaataaaagaatgtagtatatagcaattgcttttctgtagtttataagtgtgtatattttaatttataacttttctaatatatgaccaaaacatggtgatgtgcaggtggcctaccacgagaagtacccgacaatctaccacctccggaagaaactggtggacagcacagacaaggcggacctccggctcatctaccttgccctcgcgcatatgatcaagttccgcggccacttcctcatcgagggcgacctgaacccggacaactccgacgtggacaagctgttcatccagctcgtgcagacgtacaatcaactgttcgaggagaaccccataaacgctagcggcgtggacgccaaggccatcctctcggccaggctctcgaaatcaagaaggctggagaaccttatcgcgcagttgccaggcgaaaagaagaacggcctcttcggcaaccttattgcgctcagcctcggcctgacgccgaacttcaaatcaaacttcgacctcgcggaggacgccaagctccagctctcaaaggacacctacgacgacgacctcgacaacctcctggcccagataggagaccagtacgcggacctcttcctcgccgccaagaacctctccgacgctatcctgctcagcgacatccttcgggtcaacaccgaaattaccaaggcaccgctgtccgccagcatgattaaacgctacgacgagcaccatcaggacctcacgctgctcaaggcactcgtccgccagcagctccccgagaagtacaaggagatcttcttcgaccaatcaaaaaacggctacgcgggatatatcgacggcggtgccagccaggaagagttctacaagttcatcaaaccaatcctggagaagatggacggcaccgaggagttgctggtcaagctcaacagggaggacctcctcaggaagcagaggaccttcgacaacggctccatcccgcatcagatccacctgggcgaactgcatgccatcctgcggcgccaggaggacttctacccgttcctgaaggataaccgggagaagatcgagaagatcttgacgttccgcatcccatactacgtgggcccgctggctcgcggcaactcccggttcgcctggatgacccggaagtcggaggagaccatcacaccctggaactttgaggaggtggtcgataagggcgctagcgctcagagcttcatcgagcgcatgaccaacttcgataaaaacctgcccaatgaaaaagtcctccccaagcactcgctgctctacgagtacttcaccgtgtacaacgagctcaccaaggtcaaatacgtcaccgagggcatgcggaagccggcgttcctgagcggcgagcagaagaaggcgatagtggacctcctcttcaagaccaacaggaaggtgaccgtgaagcaattaaaagaggactacttcaagaaaatagagtgcttcgactccgtggagatctcgggcgtggaggatcggttcaacgcctcactcggcacgtatcacgacctcctcaagatcattaaagacaaggacttcctcgacaacgaggagaacgaggacatcctcgaggacatcgtcctcaccctgaccctgttcgaggaccgcgaaatgatcgaggagaggctgaagacctacgcgcacctgttcgacgacaaggtcatgaaacagctcaagaggcgccgctacactggttggggaaggctgtcccgcaagctcattaatggcatcagggacaagcagagcggcaagaccatcctggacttcctcaagtccgacgggttcgccaaccgcaacttcatgcagctcattcacgacgactcgctcacgttcaaggaagacatccagaaggcacaggtgagcgggcagggtgactccctccacgaacacatcgccaacctggccggctcgccggccattaaaaagggcatcctgcagacggtcaaggtcgtcgacgagctcgtgaaggtgatgggccggcacaagcccgaaaatatcgtcatagagatggccagggagaaccagaccacccaaaaagggcagaagaactcgcgcgagcggatgaaacggatcgaggagggcattaaagagctcgggtcccagatcctgaaggagcaccccgtggaaaatacccagctccagaatgaaaagctctacctctactacctgcagaacggccgcgacatgtacgtggaccaggagctggacattaatcggctatcggactacgacgtcgaccacatcgtgccgcagtcgttcctcaaggacgatagcatcgacaacaaggtgctcacccggtcggataaaaatcggggcaagagcgacaacgtgcccagcgaggaggtcgtgaagaagatgaaaaactactggcgccagctcctcaacgcgaaactgatcacccagcgcaagttcgacaacctgacgaaggcggaacgcggtggcttgagcgaactcgataaggcgggcttcataaaaaggcagctggtcgagacgcgccagatcacgaagcatgtcgcccagatcctggacagccgcatgaatactaagtacgatgaaaacgacaagctgatccgggaggtgaaggtgatcacgctgaagtccaagctcgtgtcggacttccgcaaggacttccagttctacaaggtccgcgagatcaacaactaccaccacgcccacgacgcctacctgaatgcggtggtcgggaccgccctgatcaagaagtacccgaagctggagtcggagttcgtgtacggcgactacaaggtctacgacgtgcgcaaaatgatcgccaagtccgagcaggagatcggcaaggccacggcaaaatacttcttctactcgaacatcatgaacttcttcaagaccgagatcaccctcgcgaacggcgagatccgcaagcgcccgctcatcgaaaccaacggcgagacgggcgagatcgtctgggataagggccgggatttcgcgacggtccgcaaggtgctctccatgccgcaagtcaatatcgtgaaaaagacggaggtccagacgggcgggttcagcaaggagtccatcctcccgaagcgcaactccgacaagctcatcgcgaggaagaaggattgggacccgaaaaaatatggcggcttcgacagcccgaccgtcgcatacagcgtcctcgtcgtggcgaaggtggagaagggcaagtcaaagaagctcaagtccgtgaaggagctgctcgggatcacgattatggagcggtcctccttcgagaagaacccgatcgacttcctagaggccaagggatataaggaggtcaagaaggacctgattattaaactgccgaagtactcgctcttcgagctggaaaacggccgcaagaggatgctcgcctccgcaggcgagttgcagaagggcaacgagctcgccctcccgagcaaatacgtcaatttcctgtacctcgctagccactatgaaaagctcaagggcagcccggaggacaacgagcagaagcagctcttcgtggagcagcacaagcattacctggacgagatcatcgagcagatcagcgagttctcgaagcgggtgatcctcgccgacgcgaacctggacaaggtgctgtcggcatataacaagcaccgcgacaaaccaatacgcgagcaggccgaaaatatcatccacctcttcaccctcaccaacctcggcgctccggcagccttcaagtacttcgacaccacgattgaccggaagcggtacacgagcacgaaggaggtgctcgatgcgacgctgatccaccagagcatcacagggctctatgaaacacgcatcgacctgagccagctgggcggagacaagagaccacgggaccgccacgatggcgagctgggaggccgcaagcgggcaaggtag

SEQ ID NO: 64 - protein, 1395 aa, Artificial
  protein from  Spy dcas9 gene
MAPKKKRKVMDKKYSIGLAIGTNSVGWAVITDEYKVPSKKFKVLGNTDRHSIKKNLIGALLFDSGETAEATRLKRTARRRYTRRKNRICYLQEIFSNEMAKVDDSFFHRLEESFLVEEDKKHERHPIFGNIVDEVAYHEKYPTIYHLRKKLVDSTDKADLRLIYLALAHMIKFRGHFLIEGDLNPDNSDVDKLFIQLVQTYNQLFEENPINASGVDAKAILSARLSKSRRLENLIAQLPGEKKNGLFGNLIALSLGLTPNFKSNFDLAEDAKLQLSKDTYDDDLDNLLAQIGDQYADLFLAAKNLSDAILLSDILRVNTEITKAPLSASMIKRYDEHHQDLTLLKALVRQQLPEKYKEIFFDQSKNGYAGYIDGGASQEEFYKFIKPILEKMDGTEELLVKLNREDLLRKQRTFDNGSIPHQIHLGELHAILRRQEDFYPFLKDNREKIEKILTFRIPYYVGPLARGNSRFAWMTRKSEETITPWNFEEVVDKGASAQSFIERMTNFDKNLPNEKVLPKHSLLYEYFTVYNELTKVKYVTEGMRKPAFLSGEQKKAIVDLLFKTNRKVTVKQLKEDYFKKIECFDSVEISGVEDRFNASLGTYHDLLKIIKDKDFLDNEENEDILEDIVLTLTLFEDREMIEERLKTYAHLFDDKVMKQLKRRRYTGWGRLSRKLINGIRDKQSGKTILDFLKSDGFANRNFMQLIHDDSLTFKEDIQKAQVSGQGDSLHEHIANLAGSPAIKKGILQTVKVVDELVKVMGRHKPENIVIEMARENQTTQKGQKNSRERMKRIEEGIKELGSQILKEHPVENTQLQNEKLYLYYLQNGRDMYVDQELDINRLSDYDVDAIVPQSFLKDDSIDNKVLTRSDKNRGKSDNVPSEEVVKKMKNYWRQLLNAKLITQRKFDNLTKAERGGLSELDKAGFIKRQLVETRQITKHVAQILDSRMNTKYDENDKLIREVKVITLKSKLVSDFRKDFQFYKVREINNYHHAHDAYLNAVVGTALIKKYPKLESEFVYGDYKVYDVRKMIAKSEQEIGKATAKYFFYSNIMNFFKTEITLANGEIRKRPLIETNGETGEIVWDKGRDFATVRKVLSMPQVNIVKKTEVQTGGFSKESILPKRNSDKLIARKKDWDPKKYGGFDSPTVAYSVLVVAKVEKGKSKKLKSVKELLGITIMERSSFEKNPIDFLEAKGYKEVKKDLIIKLPKYSLFELENGRKRMLASAGELQKGNELALPSKYVNFLYLASHYEKLKGSPEDNEQKQLFVEQHKHYLDEIIEQISEFSKRVILADANLDKVLSAYNKHRDKPIREQAENIIHLFTLTNLGAPAAFKYFDTTIDRKRYTSTKEVLDATLIHQSITGLYETRIDLSQLGGDKRPRDRHDGELGGRKRAR

SEQ ID NO: 65 - DNA, 4776 bp, Artificial
  Spy dcas9 gene linked with AtCBF1 transcriptional activator by 30XQ
atggcaccgaagaagaagcgcaaggtgatggacaagaagtacagcatcggcctcgccatcggcaccaactcggtgggctgggccgtcatcacggacgaatataaggtcccgtcgaagaagttcaaggtcctcggcaatacagaccgccacagcatcaagaaaaacttgatcggcgccctcctgttcgatagcggcgagaccgcggaggcgaccaggctcaagaggaccgccaggagacggtacactaggcgcaagaacaggatctgctacctgcaggagatcttcagcaacgagatggcgaaggtggacgactccttcttccaccgcctggaggaatcattcctggtggaggaggacaagaagcatgagcggcacccaatcttcggcaacatcgtcgacgaggtaagtttctgcttctacctttgatatatatataataattatcattaattagtagtaatataatatttcaaatatttttttcaaaataaaagaatgtagtatatagcaattgcttttctgtagtttataagtgtgtatattttaatttataacttttctaatatatgaccaaaacatggtgatgtgcaggtggcctaccacgagaagtacccgacaatctaccacctccggaagaaactggtggacagcacagacaaggcggacctccggctcatctaccttgccctcgcgcatatgatcaagttccgcggccacttcctcatcgagggcgacctgaacccggacaactccgacgtggacaagctgttcatccagctcgtgcagacgtacaatcaactgttcgaggagaaccccataaacgctagcggcgtggacgccaaggccatcctctcggccaggctctcgaaatcaagaaggctggagaaccttatcgcgcagttgccaggcgaaaagaagaacggcctcttcggcaaccttattgcgctcagcctcggcctgacgccgaacttcaaatcaaacttcgacctcgcggaggacgccaagctccagctctcaaaggacacctacgacgacgacctcgacaacctcctggcccagataggagaccagtacgcggacctcttcctcgccgccaagaacctctccgacgctatcctgctcagcgacatccttcgggtcaacaccgaaattaccaaggcaccgctgtccgccagcatgattaaacgctacgacgagcaccatcaggacctcacgctgctcaaggcactcgtccgccagcagctccccgagaagtacaaggagatcttcttcgaccaatcaaaaaacggctacgcgggatatatcgacggcggtgccagccaggaagagttctacaagttcatcaaaccaatcctggagaagatggacggcaccgaggagttgctggtcaagctcaacagggaggacctcctcaggaagcagaggaccttcgacaacggctccatcccgcatcagatccacctgggcgaactgcatgccatcctgcggcgccaggaggacttctacccgttcctgaaggataaccgggagaagatcgagaagatcttgacgttccgcatcccatactacgtgggcccgctggctcgcggcaactcccggttcgcctggatgacccggaagtcggaggagaccatcacaccctggaactttgaggaggtggtcgataagggcgctagcgctcagagcttcatcgagcgcatgaccaacttcgataaaaacctgcccaatgaaaaagtcctccccaagcactcgctgctctacgagtacttcaccgtgtacaacgagctcaccaaggtcaaatacgtcaccgagggcatgcggaagccggcgttcctgagcggcgagcagaagaaggcgatagtggacctcctcttcaagaccaacaggaaggtgaccgtgaagcaattaaaagaggactacttcaagaaaatagagtgcttcgactccgtggagatctcgggcgtggaggatcggttcaacgcctcactcggcacgtatcacgacctcctcaagatcattaaagacaaggacttcctcgacaacgaggagaacgaggacatcctcgaggacatcgtcctcaccctgaccctgttcgaggaccgcgaaatgatcgaggagaggctgaagacctacgcgcacctgttcgacgacaaggtcatgaaacagctcaagaggcgccgctacactggttggggaaggctgtcccgcaagctcattaatggcatcagggacaagcagagcggcaagaccatcctggacttcctcaagtccgacgggttcgccaaccgcaacttcatgcagctcattcacgacgactcgctcacgttcaaggaagacatccagaaggcacaggtgagcgggcagggtgactccctccacgaacacatcgccaacctggccggctcgccggccattaaaaagggcatcctgcagacggtcaaggtcgtcgacgagctcgtgaaggtgatgggccggcacaagcccgaaaatatcgtcatagagatggccagggagaaccagaccacccaaaaagggcagaagaactcgcgcgagcggatgaaacggatcgaggagggcattaaagagctcgggtcccagatcctgaaggagcaccccgtggaaaatacccagctccagaatgaaaagctctacctctactacctgcagaacggccgcgacatgtacgtggaccaggagctggacattaatcggctatcggactacgacgtcgacgccatcgtgccgcagtcgttcctcaaggacgatagcatcgacaacaaggtgctcacccggtcggataaaaatcggggcaagagcgacaacgtgcccagcgaggaggtcgtgaagaagatgaaaaactactggcgccagctcctcaacgcgaaactgatcacccagcgcaagttcgacaacctgacgaaggcggaacgcggtggcttgagcgaactcgataaggcgggcttcataaaaaggcagctggtcgagacgcgccagatcacgaagcatgtcgcccagatcctggacagccgcatgaatactaagtacgatgaaaacgacaagctgatccgggaggtgaaggtgatcacgctgaagtccaagctcgtgtcggacttccgcaaggacttccagttctacaaggtccgcgagatcaacaactaccaccacgcccacgacgcctacctgaatgcggtggtcgggaccgccctgatcaagaagtacccgaagctggagtcggagttcgtgtacggcgactacaaggtctacgacgtgcgcaaaatgatcgccaagtccgagcaggagatcggcaaggccacggcaaaatacttcttctactcgaacatcatgaacttcttcaagaccgagatcaccctcgcgaacggcgagatccgcaagcgcccgctcatcgaaaccaacggcgagacgggcgagatcgtctgggataagggccgggatttcgcgacggtccgcaaggtgctctccatgccgcaagtcaatatcgtgaaaaagacggaggtccagacgggcgggttcagcaaggagtccatcctcccgaagcgcaactccgacaagctcatcgcgaggaagaaggattgggacccgaaaaaatatggcggcttcgacagcccgaccgtcgcatacagcgtcctcgtcgtggcgaaggtggagaagggcaagtcaaagaagctcaagtccgtgaaggagctgctcgggatcacgattatggagcggtcctccttcgagaagaacccgatcgacttcctagaggccaagggatataaggaggtcaagaaggacctgattattaaactgccgaagtactcgctcttcgagctggaaaacggccgcaagaggatgctcgcctccgcaggcgagttgcagaagggcaacgagctcgccctcccgagcaaatacgtcaatttcctgtacctcgctagccactatgaaaagctcaagggcagcccggaggacaacgagcagaagcagctcttcgtggagcagcacaagcattacctggacgagatcatcgagcagatcagcgagttctcgaagcgggtgatcctcgccgacgcgaacctggacaaggtgctgtcggcatataacaagcaccgcgacaaaccaatacgcgagcaggccgaaaatatcatccacctcttcaccctcaccaacctcggcgctccggcagccttcaagtacttcgacaccacgattgaccggaagcggtacacgagcacgaaggaggtgctcgatgcgacgctgatccaccagagcatcacagggctctatgaaacacgcatcgacctgagccagctgggcggagacaagagaccacgggaccgccacgatggcgagctgggaggccgcaagcgggcaaggggaggatccagctcccaacagcaacaacagcagcaacagcagcagcagcagcagcaacagcaacagcaacagcagcagcagcagcagcagcaacagcagcaacaaacctgcgccaaggacatccagaaagcagccgccgaagcggccctcgccttccaagacgagacgtgcgatacaaccaccacgaatcatggcctcgatatggaggaaacgatggtcgaagccatctacaccccagagcagtcagaaggcgccttctacatggacgaggaaaccatgttcggcatgccgaccctcctcgacaacatggccgaaggaatgctcctcccacctccctcagttcagtggaaccacaactacgacggcgaaggcgacggagacgtttccctgtggagctactag

SEQ ID NO: 66 - DNA, 4680 bp, Artificial
  Spy dcas9 gene linked with AtCBF1 transcriptional activator by GRA
atggcaccgaagaagaagcgcaaggtgatggacaagaagtacagcatcggcctcgccatcggcaccaactcggtgggctgggccgtcatcacggacgaatataaggtcccgtcgaagaagttcaaggtcctcggcaatacagaccgccacagcatcaagaaaaacttgatcggcgccctcctgttcgatagcggcgagaccgcggaggcgaccaggctcaagaggaccgccaggagacggtacactaggcgcaagaacaggatctgctacctgcaggagatcttcagcaacgagatggcgaaggtggacgactccttcttccaccgcctggaggaatcattcctggtggaggaggacaagaagcatgagcggcacccaatcttcggcaacatcgtcgacgaggtaagtttctgcttctacctttgatatatatataataattatcattaattagtagtaatataatatttcaaatatttttttcaaaataaaagaatgtagtatatagcaattgcttttctgtagtttataagtgtgtatattttaatttataacttttctaatatatgaccaaaacatggtgatgtgcaggtggcctaccacgagaagtacccgacaatctaccacctccggaagaaactggtggacagcacagacaaggcggacctccggctcatctaccttgccctcgcgcatatgatcaagttccgcggccacttcctcatcgagggcgacctgaacccggacaactccgacgtggacaagctgttcatccagctcgtgcagacgtacaatcaactgttcgaggagaaccccataaacgctagcggcgtggacgccaaggccatcctctcggccaggctctcgaaatcaagaaggctggagaaccttatcgcgcagttgccaggcgaaaagaagaacggcctcttcggcaaccttattgcgctcagcctcggcctgacgccgaacttcaaatcaaacttcgacctcgcggaggacgccaagctccagctctcaaaggacacctacgacgacgacctcgacaacctcctggcccagataggagaccagtacgcggacctcttcctcgccgccaagaacctctccgacgctatcctgctcagcgacatccttcgggtcaacaccgaaattaccaaggcaccgctgtccgccagcatgattaaacgctacgacgagcaccatcaggacctcacgctgctcaaggcactcgtccgccagcagctccccgagaagtacaaggagatcttcttcgaccaatcaaaaaacggctacgcgggatatatcgacggcggtgccagccaggaagagttctacaagttcatcaaaccaatcctggagaagatggacggcaccgaggagttgctggtcaagctcaacagggaggacctcctcaggaagcagaggaccttcgacaacggctccatcccgcatcagatccacctgggcgaactgcatgccatcctgcggcgccaggaggacttctacccgttcctgaaggataaccgggagaagatcgagaagatcttgacgttccgcatcccatactacgtgggcccgctggctcgcggcaactcccggttcgcctggatgacccggaagtcggaggagaccatcacaccctggaactttgaggaggtggtcgataagggcgctagcgctcagagcttcatcgagcgcatgaccaacttcgataaaaacctgcccaatgaaaaagtcctccccaagcactcgctgctctacgagtacttcaccgtgtacaacgagctcaccaaggtcaaatacgtcaccgagggcatgcggaagccggcgttcctgagcggcgagcagaagaaggcgatagtggacctcctcttcaagaccaacaggaaggtgaccgtgaagcaattaaaagaggactacttcaagaaaatagagtgcttcgactccgtggagatctcgggcgtggaggatcggttcaacgcctcactcggcacgtatcacgacctcctcaagatcattaaagacaaggacttcctcgacaacgaggagaacgaggacatcctcgaggacatcgtcctcaccctgaccctgttcgaggaccgcgaaatgatcgaggagaggctgaagacctacgcgcacctgttcgacgacaaggtcatgaaacagctcaagaggcgccgctacactggttggggaaggctgtcccgcaagctcattaatggcatcagggacaagcagagcggcaagaccatcctggacttcctcaagtccgacgggttcgccaaccgcaacttcatgcagctcattcacgacgactcgctcacgttcaaggaagacatccagaaggcacaggtgagcgggcagggtgactccctccacgaacacatcgccaacctggccggctcgccggccattaaaaagggcatcctgcagacggtcaaggtcgtcgacgagctcgtgaaggtgatgggccggcacaagcccgaaaatatcgtcatagagatggccagggagaaccagaccacccaaaaagggcagaagaactcgcgcgagcggatgaaacggatcgaggagggcattaaagagctcgggtcccagatcctgaaggagcaccccgtggaaaatacccagctccagaatgaaaagctctacctctactacctgcagaacggccgcgacatgtacgtggaccaggagctggacattaatcggctatcggactacgacgtcgacgccatcgtgccgcagtcgttcctcaaggacgatagcatcgacaacaaggtgctcacccggtcggataaaaatcggggcaagagcgacaacgtgcccagcgaggaggtcgtgaagaagatgaaaaactactggcgccagctcctcaacgcgaaactgatcacccagcgcaagttcgacaacctgacgaaggcggaacgcggtggcttgagcgaactcgataaggcgggcttcataaaaaggcagctggtcgagacgcgccagatcacgaagcatgtcgcccagatcctggacagccgcatgaatactaagtacgatgaaaacgacaagctgatccgggaggtgaaggtgatcacgctgaagtccaagctcgtgtcggacttccgcaaggacttccagttctacaaggtccgcgagatcaacaactaccaccacgcccacgacgcctacctgaatgcggtggtcgggaccgccctgatcaagaagtacccgaagctggagtcggagttcgtgtacggcgactacaaggtctacgacgtgcgcaaaatgatcgccaagtccgagcaggagatcggcaaggccacggcaaaatacttcttctactcgaacatcatgaacttcttcaagaccgagatcaccctcgcgaacggcgagatccgcaagcgcccgctcatcgaaaccaacggcgagacgggcgagatcgtctgggataagggccgggatttcgcgacggtccgcaaggtgctctccatgccgcaagtcaatatcgtgaaaaagacggaggtccagacgggcgggttcagcaaggagtccatcctcccgaagcgcaactccgacaagctcatcgcgaggaagaaggattgggacccgaaaaaatatggcggcttcgacagcccgaccgtcgcatacagcgtcctcgtcgtggcgaaggtggagaagggcaagtcaaagaagctcaagtccgtgaaggagctgctcgggatcacgattatggagcggtcctccttcgagaagaacccgatcgacttcctagaggccaagggatataaggaggtcaagaaggacctgattattaaactgccgaagtactcgctcttcgagctggaaaacggccgcaagaggatgctcgcctccgcaggcgagttgcagaagggcaacgagctcgccctcccgagcaaatacgtcaatttcctgtacctcgctagccactatgaaaagctcaagggcagcccggaggacaacgagcagaagcagctcttcgtggagcagcacaagcattacctggacgagatcatcgagcagatcagcgagttctcgaagcgggtgatcctcgccgacgcgaacctggacaaggtgctgtcggcatataacaagcaccgcgacaaaccaatacgcgagcaggccgaaaatatcatccacctcttcaccctcaccaacctcggcgctccggcagccttcaagtacttcgacaccacgattgaccggaagcggtacacgagcacgaaggaggtgctcgatgcgacgctgatccaccagagcatcacagggctctatgaaacacgcatcgacctgagccagctgggcggagacaagagaccacgggaccgccacgatggcgagctgggaggccgcaagcgggcaaggggaagagcaacctgcgccaaggacatccagaaagcagccgccgaagcggccctcgccttccaagacgagacgtgcgatacaaccaccacgaatcatggcctcgatatggaggaaacgatggtcgaagccatctacaccccagagcagtcagaaggcgccttctacatggacgaggaaaccatgttcggcatgccgaccctcctcgacaacatggccgaaggaatgctcctcccacctccctcagttcagtggaaccacaactacgacggcgaaggcgacggagacgtttccctgtggagctactag

SEQ ID NO: 67 - protein, 1528 aa, Artificial
  protein of  Spy dcas9 gene linked with AtCBF1 transcriptional activator by 30XQ
MAPKKKRKVMDKKYSIGLAIGTNSVGWAVITDEYKVPSKKFKVLGNTDRHSIKKNLIGALLFDSGETAEATRLKRTARRRYTRRKNRICYLQEIFSNEMAKVDDSFFHRLEESFLVEEDKKHERHPIFGNIVDEVAYHEKYPTIYHLRKKLVDSTDKADLRLIYLALAHMIKFRGHFLIEGDLNPDNSDVDKLFIQLVQTYNQLFEENPINASGVDAKAILSARLSKSRRLENLIAQLPGEKKNGLFGNLIALSLGLTPNFKSNFDLAEDAKLQLSKDTYDDDLDNLLAQIGDQYADLFLAAKNLSDAILLSDILRVNTEITKAPLSASMIKRYDEHHQDLTLLKALVRQQLPEKYKEIFFDQSKNGYAGYIDGGASQEEFYKFIKPILEKMDGTEELLVKLNREDLLRKQRTFDNGSIPHQIHLGELHAILRRQEDFYPFLKDNREKIEKILTFRIPYYVGPLARGNSRFAWMTRKSEETITPWNFEEVVDKGASAQSFIERMTNFDKNLPNEKVLPKHSLLYEYFTVYNELTKVKYVTEGMRKPAFLSGEQKKAIVDLLFKTNRKVTVKQLKEDYFKKIECFDSVEISGVEDRFNASLGTYHDLLKIIKDKDFLDNEENEDILEDIVLTLTLFEDREMIEERLKTYAHLFDDKVMKQLKRRRYTGWGRLSRKLINGIRDKQSGKTILDFLKSDGFANRNFMQLIHDDSLTFKEDIQKAQVSGQGDSLHEHIANLAGSPAIKKGILQTVKVVDELVKVMGRHKPENIVIEMARENQTTQKGQKNSRERMKRIEEGIKELGSQILKEHPVENTQLQNEKLYLYYLQNGRDMYVDQELDINRLSDYDVDAIVPQSFLKDDSIDNKVLTRSDKNRGKSDNVPSEEVVKKMKNYWRQLLNAKLITQRKFDNLTKAERGGLSELDKAGFIKRQLVETRQITKHVAQILDSRMNTKYDENDKLIREVKVITLKSKLVSDFRKDFQFYKVREINNYHHAHDAYLNAVVGTALIKKYPKLESEFVYGDYKVYDVRKMIAKSEQEIGKATAKYFFYSNIMNFFKTEITLANGEIRKRPLIETNGETGEIVWDKGRDFATVRKVLSMPQVNIVKKTEVQTGGFSKESILPKRNSDKLIARKKDWDPKKYGGFDSPTVAYSVLVVAKVEKGKSKKLKSVKELLGITIMERSSFEKNPIDFLEAKGYKEVKKDLIIKLPKYSLFELENGRKRMLASAGELQKGNELALPSKYVNFLYLASHYEKLKGSPEDNEQKQLFVEQHKHYLDEIIEQISEFSKRVILADANLDKVLSAYNKHRDKPIREQAENIIHLFTLTNLGAPAAFKYFDTTIDRKRYTSTKEVLDATLIHQSITGLYETRIDLSQLGGDKRPRDRHDGELGGRKRARGGSSSQQQQQQQQQQQQQQQQQQQQQQQQQQQQQQTCAKDIQKAAAEAALAFQDETCDTTTTNHGLDMEETMVEAIYTPEQSEGAFYMDEETMFGMPTLLDNMAEGMLLPPPSVQWNHNYDGEGDGDVSLWSY

SEQ ID NO: 68 - protein, 1496 aa, Artificial
  protein of  Spy dcas9 gene linked with AtCBF1 transcriptional activator by GRA
MAPKKKRKVMDKKYSIGLAIGTNSVGWAVITDEYKVPSKKFKVLGNTDRHSIKKNLIGALLFDSGETAEATRLKRTARRRYTRRKNRICYLQEIFSNEMAKVDDSFFHRLEESFLVEEDKKHERHPIFGNIVDEVAYHEKYPTIYHLRKKLVDSTDKADLRLIYLALAHMIKFRGHFLIEGDLNPDNSDVDKLFIQLVQTYNQLFEENPINASGVDAKAILSARLSKSRRLENLIAQLPGEKKNGLFGNLIALSLGLTPNFKSNFDLAEDAKLQLSKDTYDDDLDNLLAQIGDQYADLFLAAKNLSDAILLSDILRVNTEITKAPLSASMIKRYDEHHQDLTLLKALVRQQLPEKYKEIFFDQSKNGYAGYIDGGASQEEFYKFIKPILEKMDGTEELLVKLNREDLLRKQRTFDNGSIPHQIHLGELHAILRRQEDFYPFLKDNREKIEKILTFRIPYYVGPLARGNSRFAWMTRKSEETITPWNFEEVVDKGASAQSFIERMTNFDKNLPNEKVLPKHSLLYEYFTVYNELTKVKYVTEGMRKPAFLSGEQKKAIVDLLFKTNRKVTVKQLKEDYFKKIECFDSVEISGVEDRFNASLGTYHDLLKIIKDKDFLDNEENEDILEDIVLTLTLFEDREMIEERLKTYAHLFDDKVMKQLKRRRYTGWGRLSRKLINGIRDKQSGKTILDFLKSDGFANRNFMQLIHDDSLTFKEDIQKAQVSGQGDSLHEHIANLAGSPAIKKGILQTVKVVDELVKVMGRHKPENIVIEMARENQTTQKGQKNSRERMKRIEEGIKELGSQILKEHPVENTQLQNEKLYLYYLQNGRDMYVDQELDINRLSDYDVDAIVPQSFLKDDSIDNKVLTRSDKNRGKSDNVPSEEVVKKMKNYWRQLLNAKLITQRKFDNLTKAERGGLSELDKAGFIKRQLVETRQITKHVAQILDSRMNTKYDENDKLIREVKVITLKSKLVSDFRKDFQFYKVREINNYHHAHDAYLNAVVGTALIKKYPKLESEFVYGDYKVYDVRKMIAKSEQEIGKATAKYFFYSNIMNFFKTEITLANGEIRKRPLIETNGETGEIVWDKGRDFATVRKVLSMPQVNIVKKTEVQTGGFSKESILPKRNSDKLIARKKDWDPKKYGGFDSPTVAYSVLVVAKVEKGKSKKLKSVKELLGITIMERSSFEKNPIDFLEAKGYKEVKKDLIIKLPKYSLFELENGRKRMLASAGELQKGNELALPSKYVNFLYLASHYEKLKGSPEDNEQKQLFVEQHKHYLDEIIEQISEFSKRVILADANLDKVLSAYNKHRDKPIREQAENIIHLFTLTNLGAPAAFKYFDTTIDRKRYTSTKEVLDATLIHQSITGLYETRIDLSQLGGDKRPRDRHDGELGGRKRARGRATCAKDIQKAAAEAALAFQDETCDTTTTNHGLDMEETMVEAIYTPEQSEGAFYMDEETMFGMPTLLDNMAEGMLLPPPSVQWNHNYDGEGDGDVSLWSY

SEQ ID NO: 69 - DNA, 3498 bp, Artificial
  UBI  cas5 gene with N-terminal NLS linked by 30XQ to AtCBF1 motif
gtgcagcgtgacccggtcgtgcccctctctagagataatgagcattgcatgtctaagttataaaaaattaccacatattttttttgtcacacttgtttgaagtgcagtttatctatctttatacatatatttaaactttactctacgaataatataatctatagtactacaataatatcagtgttttagagaatcatataaatgaacagttagacatggtctaaaggacaattgagtattttgacaacaggactctacagttttatctttttagtgtgcatgtgttctcctttttttttgcaaatagcttcacctatataatacttcatccattttattagtacatccatttagggtttagggttaatggtttttatagactaatttttttagtacatctattttattctattttagcctctaaattaagaaaactaaaactctattttagtttttttatttaataatttagatataaaatagaataaaataaagtgactaaaaattaaacaaataccctttaagaaattaaaaaaactaaggaaacatttttcttgtttcgagtagataatgccagcctgttaaacgccgtcgacgagtctaacggacaccaaccagcgaaccagcagcgtcgcgtcgggccaagcgaagcagacggcacggcatctctgtcgctgcctctggacccctctcgagagttccgctccaccgttggacttgctccgctgtcggcatccagaaattgcgtggcggagcggcagacgtgagccggcacggcaggcggcctcctcctcctctcacggcaccggcagctacgggggattcctttcccaccgctccttcgctttcccttcctcgcccgccgtaataaatagacaccccctccacaccctctttccccaacctcgtgttgttcggagcgcacacacacacaaccagatctcccccaaatccacccgtcggcacctccgcttcaaggtacgccgctcgtcctcccccccccccctctctaccttctctagatcggcgttccggtccatgcatggttagggcccggtagttctacttctgttcatgtttgtgttagatccgtgtttgtgttagatccgtgctgctagcgttcgtacacggatgcgacctgtacgtcagacacgttctgattgctaacttgccagtgtttctctttggggaatcctgggatggctctagccgttccgcagacgggatcgatttcatgattttttttgtttcgttgcatagggtttggtttgcccttttcctttatttcaatatatgccgtgcacttgtttgtcgggtcatcttttcatgcttttttttgtcttggttgtgatgatgtggtctggttgggcggtcgttctagatcggagtagaattctgtttcaaactacctggtggatttattaattttggatctgtatgtgtgtgccatacatattcatagttacgaattgaagatgatggatggaaatatcgatctaggataggtatacatgttgatgcgggttttactgatgcatatacagagatgctttttgttcgcttggttgtgatgatgtggtgtggttgggcggtcgttcattcgttctagatcggagtagaatactgtttcaaactacctggtgtatttattaattttggaactgtatgtgtgtgtcatacatcttcatagttacgagtttaagatggatggaaatatcgatctaggataggtatacatgttgatgtgggttttactgatgcatatacatgatggcatatgcagcatctattcatatgctctaaccttgagtacctatctattataataaacaagtatgttttataattattttgatcttgatatacttggatgatggcatatgcagcagctatatgtggatttttttagccctgccttcatacgctatttatttgcttggtactgtttcttttgtcgatgctcaccctgttgtttggtgttacttctgcaggtcgactctagaggatccatgacctgcgccaaggatatccaaaaggccgccgccgaggccgctcttgccttccaggacgaaacctgcgataccaccaccaccaaccacggactcgacatggaggagacgatggtcgaggccatctacacccccgagcaatccgagggcgccttctacatggacgaggaaaccatgttcggcatgcccaccctcctcgacaacatggccgagggaatgctcctccccccccccagcgtccaatggaaccacaactacgatggggagggagacggcgatgtgtccctttggagctaccagcagcagcagcagcaacagcagcagcagcagcagcagcaacagcagcagcagcagcagcagcaacagcagcagcagcagcagcagcagagcagctccggcggaatggctcccaagaagaagaggaaggtcatgaacgccatgaaaaccatcctcctcaagttcgccggccccctccagagctggggcaccagcagccacttcgaaacccgccacaccgacttctaccccagcaagagcgcggtcatcggcctcctcgccgccagcctcgggtacaggcgcgacgaggatgaaaaaatccagaaattaaatgagctcgacttcgccgtcagggtcgaccagcagggcaacctcctcagggacttccacgtcgcccagaagtacaccgagaagggcaagttcgaccgcaactacgtcaccaaccgctactacctcgaggacgccgtgttcgtcgtcgccctcagccacaccgacgacagcttcatcgacatcattaaaggcgccctcaagaacccctacttccagcccttcatgggcaggagggccctccccatcaccgccgacttcatcctcggcgaaaccgacgtcaaccccctcgagagcctgaagagcctcaagtggcaggccagcctctggttcatgaaaaagagccacgacaaggacgccatcagcctcgaggtctacctcgacagccagctcgtcaacaaggacgtctaccagctccgccaggactacgtccgcagcttcagccagaagggcaggaggttcggcttcaggtacgaggtccgcgaattaatcagcgtccagaacccccactacctcaacaagaatacagagcacaacatcttcgagagcatcggcgactagtcttcgtaagttaacctagacttgtccatcttctggattggccaacttaattaatgtatgaaataaaaggatgcacacatagtgacatgctaatcactataatgtgggcatcaaagttgtgtgttatgtgtaattactagttatctgaataaaagagaaagagatcatccatatttcttatcctaaatgaatgtcacgtgtctttataattctttgatgaaccagatgcatttcattaaccaaatccatatacatataaatattaatcatatataattaatatcaattgggttagcaaaacaaatctagtctaggtgtgttttgc

SEQ ID NO: 70 - DNA, 3402 bp, Artificial
  UBI  cas5 gene with N-terminal NLS linked by GRA to AtCBF1 motif
gtgcagcgtgacccggtcgtgcccctctctagagataatgagcattgcatgtctaagttataaaaaattaccacatattttttttgtcacacttgtttgaagtgcagtttatctatctttatacatatatttaaactttactctacgaataatataatctatagtactacaataatatcagtgttttagagaatcatataaatgaacagttagacatggtctaaaggacaattgagtattttgacaacaggactctacagttttatctttttagtgtgcatgtgttctcctttttttttgcaaatagcttcacctatataatacttcatccattttattagtacatccatttagggtttagggttaatggtttttatagactaatttttttagtacatctattttattctattttagcctctaaattaagaaaactaaaactctattttagtttttttatttaataatttagatataaaatagaataaaataaagtgactaaaaattaaacaaataccctttaagaaattaaaaaaactaaggaaacatttttcttgtttcgagtagataatgccagcctgttaaacgccgtcgacgagtctaacggacaccaaccagcgaaccagcagcgtcgcgtcgggccaagcgaagcagacggcacggcatctctgtcgctgcctctggacccctctcgagagttccgctccaccgttggacttgctccgctgtcggcatccagaaattgcgtggcggagcggcagacgtgagccggcacggcaggcggcctcctcctcctctcacggcaccggcagctacgggggattcctttcccaccgctccttcgctttcccttcctcgcccgccgtaataaatagacaccccctccacaccctctttccccaacctcgtgttgttcggagcgcacacacacacaaccagatctcccccaaatccacccgtcggcacctccgcttcaaggtacgccgctcgtcctcccccccccccctctctaccttctctagatcggcgttccggtccatgcatggttagggcccggtagttctacttctgttcatgtttgtgttagatccgtgtttgtgttagatccgtgctgctagcgttcgtacacggatgcgacctgtacgtcagacacgttctgattgctaacttgccagtgtttctctttggggaatcctgggatggctctagccgttccgcagacgggatcgatttcatgattttttttgtttcgttgcatagggtttggtttgcccttttcctttatttcaatatatgccgtgcacttgtttgtcgggtcatcttttcatgcttttttttgtcttggttgtgatgatgtggtctggttgggcggtcgttctagatcggagtagaattctgtttcaaactacctggtggatttattaattttggatctgtatgtgtgtgccatacatattcatagttacgaattgaagatgatggatggaaatatcgatctaggataggtatacatgttgatgcgggttttactgatgcatatacagagatgctttttgttcgcttggttgtgatgatgtggtgtggttgggcggtcgttcattcgttctagatcggagtagaatactgtttcaaactacctggtgtatttattaattttggaactgtatgtgtgtgtcatacatcttcatagttacgagtttaagatggatggaaatatcgatctaggataggtatacatgttgatgtgggttttactgatgcatatacatgatggcatatgcagcatctattcatatgctctaaccttgagtacctatctattataataaacaagtatgttttataattattttgatcttgatatacttggatgatggcatatgcagcagctatatgtggatttttttagccctgccttcatacgctatttatttgcttggtactgtttcttttgtcgatgctcaccctgttgtttggtgttacttctgcaggtcgactctagaggatccatgacctgtgcaaaggacatccagaaggcagccgccgaggcggcgcttgcattccaggacgaaacctgcgacaccaccaccaccaaccacggactggacatggaggagacgatggtcgaggcaatctacacccccgagcagagcgagggcgccttctacatggacgaggaaaccatgttcggcatgcccaccctcctcgacaacatggcagaggggatgctcctcccccccccgagcgtccagtggaaccacaattacgacggagagggagacggcgacgtcagcctttggtcgtatgcacggggaatggcgcccaagaagaagaggaaggtcatgaacgccatgaaaaccatcctcctcaagttcgccggccccctccagagctggggcaccagcagccacttcgaaacccgccacaccgacttctaccccagcaagagcgcggtcatcggcctcctcgccgccagcctcgggtacaggcgcgacgaggatgaaaaaatccagaaattaaatgagctcgacttcgccgtcagggtcgaccagcagggcaacctcctcagggacttccacgtcgcccagaagtacaccgagaagggcaagttcgaccgcaactacgtcaccaaccgctactacctcgaggacgccgtgttcgtcgtcgccctcagccacaccgacgacagcttcatcgacatcattaaaggcgccctcaagaacccctacttccagcccttcatgggcaggagggccctccccatcaccgccgacttcatcctcggcgaaaccgacgtcaaccccctcgagagcctgaagagcctcaagtggcaggccagcctctggttcatgaaaaagagccacgacaaggacgccatcagcctcgaggtctacctcgacagccagctcgtcaacaaggacgtctaccagctccgccaggactacgtccgcagcttcagccagaagggcaggaggttcggcttcaggtacgaggtccgcgaattaatcagcgtccagaacccccactacctcaacaagaatacagagcacaacatcttcgagagcatcggcgactagtcttcgtaagttaacctagacttgtccatcttctggattggccaacttaattaatgtatgaaataaaaggatgcacacatagtgacatgctaatcactataatgtgggcatcaaagttgtgtgttatgtgtaattactagttatctgaataaaagagaaagagatcatccatatttcttatcctaaatgaatgtcacgtgtctttataattctttgatgaaccagatgcatttcattaaccaaatccatatacatataaatattaatcatatataattaatatcaattgggttagcaaaacaaatctagtctaggtgtgttttgc

SEQ ID NO: 71 - DNA, 3501 bp, Artificial
  UBI  cas5 gene with C-terminal NLS linked by 30XQ to AtCBF1 motif
gtgcagcgtgacccggtcgtgcccctctctagagataatgagcattgcatgtctaagttataaaaaattaccacatattttttttgtcacacttgtttgaagtgcagtttatctatctttatacatatatttaaactttactctacgaataatataatctatagtactacaataatatcagtgttttagagaatcatataaatgaacagttagacatggtctaaaggacaattgagtattttgacaacaggactctacagttttatctttttagtgtgcatgtgttctcctttttttttgcaaatagcttcacctatataatacttcatccattttattagtacatccatttagggtttagggttaatggtttttatagactaatttttttagtacatctattttattctattttagcctctaaattaagaaaactaaaactctattttagtttttttatttaataatttagatataaaatagaataaaataaagtgactaaaaattaaacaaataccctttaagaaattaaaaaaactaaggaaacatttttcttgtttcgagtagataatgccagcctgttaaacgccgtcgacgagtctaacggacaccaaccagcgaaccagcagcgtcgcgtcgggccaagcgaagcagacggcacggcatctctgtcgctgcctctggacccctctcgagagttccgctccaccgttggacttgctccgctgtcggcatccagaaattgcgtggcggagcggcagacgtgagccggcacggcaggcggcctcctcctcctctcacggcaccggcagctacgggggattcctttcccaccgctccttcgctttcccttcctcgcccgccgtaataaatagacaccccctccacaccctctttccccaacctcgtgttgttcggagcgcacacacacacaaccagatctcccccaaatccacccgtcggcacctccgcttcaaggtacgccgctcgtcctcccccccccccctctctaccttctctagatcggcgttccggtccatgcatggttagggcccggtagttctacttctgttcatgtttgtgttagatccgtgtttgtgttagatccgtgctgctagcgttcgtacacggatgcgacctgtacgtcagacacgttctgattgctaacttgccagtgtttctctttggggaatcctgggatggctctagccgttccgcagacgggatcgatttcatgattttttttgtttcgttgcatagggtttggtttgcccttttcctttatttcaatatatgccgtgcacttgtttgtcgggtcatcttttcatgcttttttttgtcttggttgtgatgatgtggtctggttgggcggtcgttctagatcggagtagaattctgtttcaaactacctggtggatttattaattttggatctgtatgtgtgtgccatacatattcatagttacgaattgaagatgatggatggaaatatcgatctaggataggtatacatgttgatgcgggttttactgatgcatatacagagatgctttttgttcgcttggttgtgatgatgtggtgtggttgggcggtcgttcattcgttctagatcggagtagaatactgtttcaaactacctggtgtatttattaattttggaactgtatgtgtgtgtcatacatcttcatagttacgagtttaagatggatggaaatatcgatctaggataggtatacatgttgatgtgggttttactgatgcatatacatgatggcatatgcagcatctattcatatgctctaaccttgagtacctatctattataataaacaagtatgttttataattattttgatcttgatatacttggatgatggcatatgcagcagctatatgtggatttttttagccctgccttcatacgctatttatttgcttggtactgtttcttttgtcgatgctcaccctgttgtttggtgttacttctgcaggtcgactctagaggatccatgaacgccatgaaaaccatcctcctcaagttcgccggccccctccagagctggggcaccagcagccacttcgaaacccgccacaccgacttctaccccagcaagagcgcggtcatcggcctcctcgccgccagcctcgggtacaggcgcgacgaggatgaaaaaatccagaaattaaatgagctcgacttcgccgtcagggtcgaccagcagggcaacctcctcagggacttccacgtcgcccagaagtacaccgagaagggcaagttcgaccgcaactacgtcaccaaccgctactacctcgaggacgccgtgttcgtcgtcgccctcagccacaccgacgacagcttcatcgacatcattaaaggcgccctcaagaacccctacttccagcccttcatgggcaggagggccctccccatcaccgccgacttcatcctcggcgaaaccgacgtcaaccccctcgagagcctgaagagcctcaagtggcaggccagcctctggttcatgaaaaagagccacgacaaggacgccatcagcctcgaggtctacctcgacagccagctcgtcaacaaggacgtctaccagctccgccaggactacgtccgcagcttcagccagaagggcaggaggttcggcttcaggtacgaggtccgcgaattaatcagcgtccagaacccccactacctcaacaagaatacagagcacaacatcttcgagagcatcggcgacagcagggccgaccccaagaagaagaggaaggtgggcggctcttcaagccaacagcagcagcagcagcagcagcaacagcagcagcagcagcagcagcaacagcagcagcagcagcagcagcaacagcagcagcagcagacctgcgcaaaggacatccagaaggccgcggcagaggccgcgctggcttttcaggacgaaacctgcgacaccaccaccaccaaccacggcctcgacatggaggaaacgatggtggaggcgatttacaccccagaacagtctgagggcgccttctacatggacgaggaaaccatgttcggcatgccaaccctcctcgacaacatggccgagggcatgctcctcccaccgccgtctgtccagtggaatcacaactacgacggcgaaggcgacggcgacgtcagcctctggagctactagtcttcgtaagttaacctagacttgtccatcttctggattggccaacttaattaatgtatgaaataaaaggatgcacacatagtgacatgctaatcactataatgtgggcatcaaagttgtgtgttatgtgtaattactagttatctgaataaaagagaaagagatcatccatatttcttatcctaaatgaatgtcacgtgtctttataattctttgatgaaccagatgcatttcattaaccaaatccatatacatataaatattaatcatatataattaatatcaattgggttagcaaaacaaatctagtctaggtgtgttttgc

SEQ ID NO: 72 - DNA, 3405 bp, Artificial
  UBI  cas5 gene with C-terminal NLS linked by GRA to AtCBF1 motif
gtgcagcgtgacccggtcgtgcccctctctagagataatgagcattgcatgtctaagttataaaaaattaccacatattttttttgtcacacttgtttgaagtgcagtttatctatctttatacatatatttaaactttactctacgaataatataatctatagtactacaataatatcagtgttttagagaatcatataaatgaacagttagacatggtctaaaggacaattgagtattttgacaacaggactctacagttttatctttttagtgtgcatgtgttctcctttttttttgcaaatagcttcacctatataatacttcatccattttattagtacatccatttagggtttagggttaatggtttttatagactaatttttttagtacatctattttattctattttagcctctaaattaagaaaactaaaactctattttagtttttttatttaataatttagatataaaatagaataaaataaagtgactaaaaattaaacaaataccctttaagaaattaaaaaaactaaggaaacatttttcttgtttcgagtagataatgccagcctgttaaacgccgtcgacgagtctaacggacaccaaccagcgaaccagcagcgtcgcgtcgggccaagcgaagcagacggcacggcatctctgtcgctgcctctggacccctctcgagagttccgctccaccgttggacttgctccgctgtcggcatccagaaattgcgtggcggagcggcagacgtgagccggcacggcaggcggcctcctcctcctctcacggcaccggcagctacgggggattcctttcccaccgctccttcgctttcccttcctcgcccgccgtaataaatagacaccccctccacaccctctttccccaacctcgtgttgttcggagcgcacacacacacaaccagatctcccccaaatccacccgtcggcacctccgcttcaaggtacgccgctcgtcctcccccccccccctctctaccttctctagatcggcgttccggtccatgcatggttagggcccggtagttctacttctgttcatgtttgtgttagatccgtgtttgtgttagatccgtgctgctagcgttcgtacacggatgcgacctgtacgtcagacacgttctgattgctaacttgccagtgtttctctttggggaatcctgggatggctctagccgttccgcagacgggatcgatttcatgattttttttgtttcgttgcatagggtttggtttgcccttttcctttatttcaatatatgccgtgcacttgtttgtcgggtcatcttttcatgcttttttttgtcttggttgtgatgatgtggtctggttgggcggtcgttctagatcggagtagaattctgtttcaaactacctggtggatttattaattttggatctgtatgtgtgtgccatacatattcatagttacgaattgaagatgatggatggaaatatcgatctaggataggtatacatgttgatgcgggttttactgatgcatatacagagatgctttttgttcgcttggttgtgatgatgtggtgtggttgggcggtcgttcattcgttctagatcggagtagaatactgtttcaaactacctggtgtatttattaattttggaactgtatgtgtgtgtcatacatcttcatagttacgagtttaagatggatggaaatatcgatctaggataggtatacatgttgatgtgggttttactgatgcatatacatgatggcatatgcagcatctattcatatgctctaaccttgagtacctatctattataataaacaagtatgttttataattattttgatcttgatatacttggatgatggcatatgcagcagctatatgtggatttttttagccctgccttcatacgctatttatttgcttggtactgtttcttttgtcgatgctcaccctgttgtttggtgttacttctgcaggtcgactctagaggatccatgaacgccatgaaaaccatcctcctcaagttcgccggccccctccagagctggggcaccagcagccacttcgaaacccgccacaccgacttctaccccagcaagagcgcggtcatcggcctcctcgccgccagcctcgggtacaggcgcgacgaggatgaaaaaatccagaaattaaatgagctcgacttcgccgtcagggtcgaccagcagggcaacctcctcagggacttccacgtcgcccagaagtacaccgagaagggcaagttcgaccgcaactacgtcaccaaccgctactacctcgaggacgccgtgttcgtcgtcgccctcagccacaccgacgacagcttcatcgacatcattaaaggcgccctcaagaacccctacttccagcccttcatgggcaggagggccctccccatcaccgccgacttcatcctcggcgaaaccgacgtcaaccccctcgagagcctgaagagcctcaagtggcaggccagcctctggttcatgaaaaagagccacgacaaggacgccatcagcctcgaggtctacctcgacagccagctcgtcaacaaggacgtctaccagctccgccaggactacgtccgcagcttcagccagaagggcaggaggttcggcttcaggtacgaggtccgcgaattaatcagcgtccagaacccccactacctcaacaagaatacagagcacaacatcttcgagagcatcggcgacagcagggccgaccccaagaagaagaggaaggtgggtcgggcgacatgtgccaaggacatccagaaggccgctgccgaagcggcgctcgcttttcaggacgaaacctgcgacaccaccaccaccaaccacggcctcgacatggaggaaacaatggtggaggccatctacacgcctgaacagagcgagggggctttctacatggacgaggaaaccatgttcggcatgcccacactcctcgacaacatggccgagggcatgctcctcccccccccgagcgtccagtggaaccacaactacgacggcgaaggcgacggcgacgtcagcctctggtcctactagtcttcgtaagttaacctagacttgtccatcttctggattggccaacttaattaatgtatgaaataaaaggatgcacacatagtgacatgctaatcactataatgtgggcatcaaagttgtgtgttatgtgtaattactagttatctgaataaaagagaaagagatcatccatatttcttatcctaaatgaatgtcacgtgtctttataattctttgatgaaccagatgcatttcattaaccaaatccatatacatataaatattaatcatatataattaatatcaattgggttagcaaaacaaatctagtctaggtgtgttttgc

SEQ ID NO: 73 - DNA, 4431 bp, Artificial
  UBI  cse1 gene with N-terminal NLS linked by 30XQ to AtCBF1 motif
gtgcagcgtgacccggtcgtgcccctctctagagataatgagcattgcatgtctaagttataaaaaattaccacatattttttttgtcacacttgtttgaagtgcagtttatctatctttatacatatatttaaactttactctacgaataatataatctatagtactacaataatatcagtgttttagagaatcatataaatgaacagttagacatggtctaaaggacaattgagtattttgacaacaggactctacagttttatctttttagtgtgcatgtgttctcctttttttttgcaaatagcttcacctatataatacttcatccattttattagtacatccatttagggtttagggttaatggtttttatagactaatttttttagtacatctattttattctattttagcctctaaattaagaaaactaaaactctattttagtttttttatttaataatttagatataaaatagaataaaataaagtgactaaaaattaaacaaataccctttaagaaattaaaaaaactaaggaaacatttttcttgtttcgagtagataatgccagcctgttaaacgccgtcgacgagtctaacggacaccaaccagcgaaccagcagcgtcgcgtcgggccaagcgaagcagacggcacggcatctctgtcgctgcctctggacccctctcgagagttccgctccaccgttggacttgctccgctgtcggcatccagaaattgcgtggcggagcggcagacgtgagccggcacggcaggcggcctcctcctcctctcacggcaccggcagctacgggggattcctttcccaccgctccttcgctttcccttcctcgcccgccgtaataaatagacaccccctccacaccctctttccccaacctcgtgttgttcggagcgcacacacacacaaccagatctcccccaaatccacccgtcggcacctccgcttcaaggtacgccgctcgtcctcccccccccccctctctaccttctctagatcggcgttccggtccatgcatggttagggcccggtagttctacttctgttcatgtttgtgttagatccgtgtttgtgttagatccgtgctgctagcgttcgtacacggatgcgacctgtacgtcagacacgttctgattgctaacttgccagtgtttctctttggggaatcctgggatggctctagccgttccgcagacgggatcgatttcatgattttttttgtttcgttgcatagggtttggtttgcccttttcctttatttcaatatatgccgtgcacttgtttgtcgggtcatcttttcatgcttttttttgtcttggttgtgatgatgtggtctggttgggcggtcgttctagatcggagtagaattctgtttcaaactacctggtggatttattaattttggatctgtatgtgtgtgccatacatattcatagttacgaattgaagatgatggatggaaatatcgatctaggataggtatacatgttgatgcgggttttactgatgcatatacagagatgctttttgttcgcttggttgtgatgatgtggtgtggttgggcggtcgttcattcgttctagatcggagtagaatactgtttcaaactacctggtgtatttattaattttggaactgtatgtgtgtgtcatacatcttcatagttacgagtttaagatggatggaaatatcgatctaggataggtatacatgttgatgtgggttttactgatgcatatacatgatggcatatgcagcatctattcatatgctctaaccttgagtacctatctattataataaacaagtatgttttataattattttgatcttgatatacttggatgatggcatatgcagcagctatatgtggatttttttagccctgccttcatacgctatttatttgcttggtactgtttcttttgtcgatgctcaccctgttgtttggtgttacttctgcaggtcgactctagaggatccatgacctgcgccaaggatatccaaaaggccgccgccgaggccgctcttgccttccaggacgaaacctgcgataccaccaccaccaaccacggactcgacatggaggagacgatggtcgaggccatctacacccccgagcaatccgagggcgccttctacatggacgaggaaaccatgttcggcatgcccaccctcctcgacaacatggccgagggaatgctcctccccccccccagcgtccaatggaaccacaactacgatggggagggagacggcgatgtgtccctttggagctaccagcagcagcagcagcaacagcagcagcagcagcagcagcaacagcagcagcagcagcagcagcaacagcagcagcagcagcagcagcagagcagctccggcggaatggctcccaagaagaagaggaaggtcatgagccgcttcaacctcctcgacgagccctggatcagcgtcatctacgacgagaagggcagcaccaaggacgtcagcctccaggacctcttcaccaacgcccaccagtacaaggagctcgccggcgacaccaagacccaggacttcgccgtcctcagggtcctcctcgccgtcctccacaccgtgttcagccgcttcgacatcgacggcaacgcctacgagtacctcaccatcgacgagggctggaaccagctcgagcccgtcgacgagatggacatcgagaactacgaggaggccctctatgaaacatgggagaagctctggaccaataaaagattccccaacatcgtcaatcaatacctcgagaagtggagggaccgcttctacctcttcgaccagaagtaccccttcttccaggtcaccaaggaggacatcgccggcgataaaattagcaaggccaagggcaccagcatcctcggcaaaaatataaatcgcatcatcagcgagagcggcaacaagatcgccctcttcagccccaaggacgaggaaaataaaaatactctcaccgccgccgagctcgccaggtggctcatcaccttccagggctacagcggcgtcagcgacaaggtcatcttcggcaatgaaaaatatacccccagcaagggctggctcttcgacatcggcgccatctacattaaaggcaacaccctcttcgaaaccctcctcctcaactacatcagcccctacaacgagtgcggcaatgtggaaaatatacagaggccctgctgggagaggaagagcagcgacatcattaaaagctacctcgatgaaaaagacatcaccaacatcgccagcctctacaccgtctggagcaagggcatctacatcgaccccgacttcaacctcaataaacccttcagcttcgacatcgtcaagctccccgacatcaaccaccgcgacaacttcctcgagcccatgaccctctggaagtacaacgtcagcggcaaaaatagggacagctacacccccaagaagcacctcctcaaccagagcctctggaggagcttcggcctcctgagcataaaagacaccgacctccagcacaggaagcccggcgtcatcgagtggctcacctacatcgacgatataataggcaacaggctcagcaacatcgtcgccatcagcatgcaggacgacggcaacccccagagcaggctgcccaccgacgaggtcatcgacagcatcttcatcaacgacctcgtcctcaccgacctcgacgagggcggctgggtccccaggatcaacgaggtcgtcgaggaaaccaagaagatcatcagcaggacatataaaacgtacattaatgatataaaggagatccgcaacatcagcaacggcagctacacccagcagatcgtcgagagcctctacttcaagatcgaccagcccttcaggcagtggctcgccagcatccagcccgaggacgacaaggacagcaagatccaggagtggcgcgtcctcctcaagaaaatagtcaaggccgaggccgaggtcatcctccaccagggcggcgccagggactacctcggcatccagaaggacggccgaattaagaacatcgccaccgcctacaacagcttcgacttctggctccgccagcagttaaaatagtcttcgtaagttaacctagacttgtccatcttctggattggccaacttaattaatgtatgaaataaaaggatgcacacatagtgacatgctaatcactataatgtgggcatcaaagttgtgtgttatgtgtaattactagttatctgaataaaagagaaagagatcatccatatttcttatcctaaatgaatgtcacgtgtctttataattctttgatgaaccagatgcatttcattaaccaaatccatatacatataaatattaatcatatataattaatatcaattgggttagcaaaacaaatctagtctaggtgtgttttgc

SEQ ID NO: 74 - DNA, 4335 bp, Artificial
  UBI  cse1 gene with N-terminal NLS linked by GRA to AtCBF1 motif
gtgcagcgtgacccggtcgtgcccctctctagagataatgagcattgcatgtctaagttataaaaaattaccacatattttttttgtcacacttgtttgaagtgcagtttatctatctttatacatatatttaaactttactctacgaataatataatctatagtactacaataatatcagtgttttagagaatcatataaatgaacagttagacatggtctaaaggacaattgagtattttgacaacaggactctacagttttatctttttagtgtgcatgtgttctcctttttttttgcaaatagcttcacctatataatacttcatccattttattagtacatccatttagggtttagggttaatggtttttatagactaatttttttagtacatctattttattctattttagcctctaaattaagaaaactaaaactctattttagtttttttatttaataatttagatataaaatagaataaaataaagtgactaaaaattaaacaaataccctttaagaaattaaaaaaactaaggaaacatttttcttgtttcgagtagataatgccagcctgttaaacgccgtcgacgagtctaacggacaccaaccagcgaaccagcagcgtcgcgtcgggccaagcgaagcagacggcacggcatctctgtcgctgcctctggacccctctcgagagttccgctccaccgttggacttgctccgctgtcggcatccagaaattgcgtggcggagcggcagacgtgagccggcacggcaggcggcctcctcctcctctcacggcaccggcagctacgggggattcctttcccaccgctccttcgctttcccttcctcgcccgccgtaataaatagacaccccctccacaccctctttccccaacctcgtgttgttcggagcgcacacacacacaaccagatctcccccaaatccacccgtcggcacctccgcttcaaggtacgccgctcgtcctcccccccccccctctctaccttctctagatcggcgttccggtccatgcatggttagggcccggtagttctacttctgttcatgtttgtgttagatccgtgtttgtgttagatccgtgctgctagcgttcgtacacggatgcgacctgtacgtcagacacgttctgattgctaacttgccagtgtttctctttggggaatcctgggatggctctagccgttccgcagacgggatcgatttcatgattttttttgtttcgttgcatagggtttggtttgcccttttcctttatttcaatatatgccgtgcacttgtttgtcgggtcatcttttcatgcttttttttgtcttggttgtgatgatgtggtctggttgggcggtcgttctagatcggagtagaattctgtttcaaactacctggtggatttattaattttggatctgtatgtgtgtgccatacatattcatagttacgaattgaagatgatggatggaaatatcgatctaggataggtatacatgttgatgcgggttttactgatgcatatacagagatgctttttgttcgcttggttgtgatgatgtggtgtggttgggcggtcgttcattcgttctagatcggagtagaatactgtttcaaactacctggtgtatttattaattttggaactgtatgtgtgtgtcatacatcttcatagttacgagtttaagatggatggaaatatcgatctaggataggtatacatgttgatgtgggttttactgatgcatatacatgatggcatatgcagcatctattcatatgctctaaccttgagtacctatctattataataaacaagtatgttttataattattttgatcttgatatacttggatgatggcatatgcagcagctatatgtggatttttttagccctgccttcatacgctatttatttgcttggtactgtttcttttgtcgatgctcaccctgttgtttggtgttacttctgcaggtcgactctagaggatccatgacctgtgcaaaggacatccagaaggcagccgccgaggcggcgcttgcattccaggacgaaacctgcgacaccaccaccaccaaccacggactggacatggaggagacgatggtcgaggcaatctacacccccgagcagagcgagggcgccttctacatggacgaggaaaccatgttcggcatgcccaccctcctcgacaacatggcagaggggatgctcctcccccccccgagcgtccagtggaaccacaattacgacggagagggagacggcgacgtcagcctttggtcgtatgcacggggaatggcgcccaagaagaagaggaaggtcatgagccgcttcaacctcctcgacgagccctggatcagcgtcatctacgacgagaagggcagcaccaaggacgtcagcctccaggacctcttcaccaacgcccaccagtacaaggagctcgccggcgacaccaagacccaggacttcgccgtcctcagggtcctcctcgccgtcctccacaccgtgttcagccgcttcgacatcgacggcaacgcctacgagtacctcaccatcgacgagggctggaaccagctcgagcccgtcgacgagatggacatcgagaactacgaggaggccctctatgaaacatgggagaagctctggaccaataaaagattccccaacatcgtcaatcaatacctcgagaagtggagggaccgcttctacctcttcgaccagaagtaccccttcttccaggtcaccaaggaggacatcgccggcgataaaattagcaaggccaagggcaccagcatcctcggcaaaaatataaatcgcatcatcagcgagagcggcaacaagatcgccctcttcagccccaaggacgaggaaaataaaaatactctcaccgccgccgagctcgccaggtggctcatcaccttccagggctacagcggcgtcagcgacaaggtcatcttcggcaatgaaaaatatacccccagcaagggctggctcttcgacatcggcgccatctacattaaaggcaacaccctcttcgaaaccctcctcctcaactacatcagcccctacaacgagtgcggcaatgtggaaaatatacagaggccctgctgggagaggaagagcagcgacatcattaaaagctacctcgatgaaaaagacatcaccaacatcgccagcctctacaccgtctggagcaagggcatctacatcgaccccgacttcaacctcaataaacccttcagcttcgacatcgtcaagctccccgacatcaaccaccgcgacaacttcctcgagcccatgaccctctggaagtacaacgtcagcggcaaaaatagggacagctacacccccaagaagcacctcctcaaccagagcctctggaggagcttcggcctcctgagcataaaagacaccgacctccagcacaggaagcccggcgtcatcgagtggctcacctacatcgacgatataataggcaacaggctcagcaacatcgtcgccatcagcatgcaggacgacggcaacccccagagcaggctgcccaccgacgaggtcatcgacagcatcttcatcaacgacctcgtcctcaccgacctcgacgagggcggctgggtccccaggatcaacgaggtcgtcgaggaaaccaagaagatcatcagcaggacatataaaacgtacattaatgatataaaggagatccgcaacatcagcaacggcagctacacccagcagatcgtcgagagcctctacttcaagatcgaccagcccttcaggcagtggctcgccagcatccagcccgaggacgacaaggacagcaagatccaggagtggcgcgtcctcctcaagaaaatagtcaaggccgaggccgaggtcatcctccaccagggcggcgccagggactacctcggcatccagaaggacggccgaattaagaacatcgccaccgcctacaacagcttcgacttctggctccgccagcagttaaaatagtcttcgtaagttaacctagacttgtccatcttctggattggccaacttaattaatgtatgaaataaaaggatgcacacatagtgacatgctaatcactataatgtgggcatcaaagttgtgtgttatgtgtaattactagttatctgaataaaagagaaagagatcatccatatttcttatcctaaatgaatgtcacgtgtctttataattctttgatgaaccagatgcatttcattaaccaaatccatatacatataaatattaatcatatataattaatatcaattgggttagcaaaacaaatctagtctaggtgtgttttgc

SEQ ID NO: 75 - DNA, 7116 bp, Artificial
  UBI  Spy dcas9 gene linked with AtCBF1 transcriptional activator by 30XQ
gtgcagcgtgacccggtcgtgcccctctctagagataatgagcattgcatgtctaagttataaaaaattaccacatattttttttgtcacacttgtttgaagtgcagtttatctatctttatacatatatttaaactttactctacgaataatataatctatagtactacaataatatcagtgttttagagaatcatataaatgaacagttagacatggtctaaaggacaattgagtattttgacaacaggactctacagttttatctttttagtgtgcatgtgttctcctttttttttgcaaatagcttcacctatataatacttcatccattttattagtacatccatttagggtttagggttaatggtttttatagactaatttttttagtacatctattttattctattttagcctctaaattaagaaaactaaaactctattttagtttttttatttaataatttagatataaaatagaataaaataaagtgactaaaaattaaacaaataccctttaagaaattaaaaaaactaaggaaacatttttcttgtttcgagtagataatgccagcctgttaaacgccgtcgacgagtctaacggacaccaaccagcgaaccagcagcgtcgcgtcgggccaagcgaagcagacggcacggcatctctgtcgctgcctctggacccctctcgagagttccgctccaccgttggacttgctccgctgtcggcatccagaaattgcgtggcggagcggcagacgtgagccggcacggcaggcggcctcctcctcctctcacggcaccggcagctacgggggattcctttcccaccgctccttcgctttcccttcctcgcccgccgtaataaatagacaccccctccacaccctctttccccaacctcgtgttgttcggagcgcacacacacacaaccagatctcccccaaatccacccgtcggcacctccgcttcaaggtacgccgctcgtcctcccccccccccctctctaccttctctagatcggcgttccggtccatgcatggttagggcccggtagttctacttctgttcatgtttgtgttagatccgtgtttgtgttagatccgtgctgctagcgttcgtacacggatgcgacctgtacgtcagacacgttctgattgctaacttgccagtgtttctctttggggaatcctgggatggctctagccgttccgcagacgggatcgatttcatgattttttttgtttcgttgcatagggtttggtttgcccttttcctttatttcaatatatgccgtgcacttgtttgtcgggtcatcttttcatgcttttttttgtcttggttgtgatgatgtggtctggttgggcggtcgttctagatcggagtagaattctgtttcaaactacctggtggatttattaattttggatctgtatgtgtgtgccatacatattcatagttacgaattgaagatgatggatggaaatatcgatctaggataggtatacatgttgatgcgggttttactgatgcatatacagagatgctttttgttcgcttggttgtgatgatgtggtgtggttgggcggtcgttcattcgttctagatcggagtagaatactgtttcaaactacctggtgtatttattaattttggaactgtatgtgtgtgtcatacatcttcatagttacgagtttaagatggatggaaatatcgatctaggataggtatacatgttgatgtgggttttactgatgcatatacatgatggcatatgcagcatctattcatatgctctaaccttgagtacctatctattataataaacaagtatgttttataattattttgatcttgatatacttggatgatggcatatgcagcagctatatgtggatttttttagccctgccttcatacgctatttatttgcttggtactgtttcttttgtcgatgctcaccctgttgtttggtgttacttctgcaggtcgactctagaggatccatggcaccgaagaagaagcgcaaggtgatggacaagaagtacagcatcggcctcgccatcggcaccaactcggtgggctgggccgtcatcacggacgaatataaggtcccgtcgaagaagttcaaggtcctcggcaatacagaccgccacagcatcaagaaaaacttgatcggcgccctcctgttcgatagcggcgagaccgcggaggcgaccaggctcaagaggaccgccaggagacggtacactaggcgcaagaacaggatctgctacctgcaggagatcttcagcaacgagatggcgaaggtggacgactccttcttccaccgcctggaggaatcattcctggtggaggaggacaagaagcatgagcggcacccaatcttcggcaacatcgtcgacgaggtaagtttctgcttctacctttgatatatatataataattatcattaattagtagtaatataatatttcaaatatttttttcaaaataaaagaatgtagtatatagcaattgcttttctgtagtttataagtgtgtatattttaatttataacttttctaatatatgaccaaaacatggtgatgtgcaggtggcctaccacgagaagtacccgacaatctaccacctccggaagaaactggtggacagcacagacaaggcggacctccggctcatctaccttgccctcgcgcatatgatcaagttccgcggccacttcctcatcgagggcgacctgaacccggacaactccgacgtggacaagctgttcatccagctcgtgcagacgtacaatcaactgttcgaggagaaccccataaacgctagcggcgtggacgccaaggccatcctctcggccaggctctcgaaatcaagaaggctggagaaccttatcgcgcagttgccaggcgaaaagaagaacggcctcttcggcaaccttattgcgctcagcctcggcctgacgccgaacttcaaatcaaacttcgacctcgcggaggacgccaagctccagctctcaaaggacacctacgacgacgacctcgacaacctcctggcccagataggagaccagtacgcggacctcttcctcgccgccaagaacctctccgacgctatcctgctcagcgacatccttcgggtcaacaccgaaattaccaaggcaccgctgtccgccagcatgattaaacgctacgacgagcaccatcaggacctcacgctgctcaaggcactcgtccgccagcagctccccgagaagtacaaggagatcttcttcgaccaatcaaaaaacggctacgcgggatatatcgacggcggtgccagccaggaagagttctacaagttcatcaaaccaatcctggagaagatggacggcaccgaggagttgctggtcaagctcaacagggaggacctcctcaggaagcagaggaccttcgacaacggctccatcccgcatcagatccacctgggcgaactgcatgccatcctgcggcgccaggaggacttctacccgttcctgaaggataaccgggagaagatcgagaagatcttgacgttccgcatcccatactacgtgggcccgctggctcgcggcaactcccggttcgcctggatgacccggaagtcggaggagaccatcacaccctggaactttgaggaggtggtcgataagggcgctagcgctcagagcttcatcgagcgcatgaccaacttcgataaaaacctgcccaatgaaaaagtcctccccaagcactcgctgctctacgagtacttcaccgtgtacaacgagctcaccaaggtcaaatacgtcaccgagggcatgcggaagccggcgttcctgagcggcgagcagaagaaggcgatagtggacctcctcttcaagaccaacaggaaggtgaccgtgaagcaattaaaagaggactacttcaagaaaatagagtgcttcgactccgtggagatctcgggcgtggaggatcggttcaacgcctcactcggcacgtatcacgacctcctcaagatcattaaagacaaggacttcctcgacaacgaggagaacgaggacatcctcgaggacatcgtcctcaccctgaccctgttcgaggaccgcgaaatgatcgaggagaggctgaagacctacgcgcacctgttcgacgacaaggtcatgaaacagctcaagaggcgccgctacactggttggggaaggctgtcccgcaagctcattaatggcatcagggacaagcagagcggcaagaccatcctggacttcctcaagtccgacgggttcgccaaccgcaacttcatgcagctcattcacgacgactcgctcacgttcaaggaagacatccagaaggcacaggtgagcgggcagggtgactccctccacgaacacatcgccaacctggccggctcgccggccattaaaaagggcatcctgcagacggtcaaggtcgtcgacgagctcgtgaaggtgatgggccggcacaagcccgaaaatatcgtcatagagatggccagggagaaccagaccacccaaaaagggcagaagaactcgcgcgagcggatgaaacggatcgaggagggcattaaagagctcgggtcccagatcctgaaggagcaccccgtggaaaatacccagctccagaatgaaaagctctacctctactacctgcagaacggccgcgacatgtacgtggaccaggagctggacattaatcggctatcggactacgacgtcgacgccatcgtgccgcagtcgttcctcaaggacgatagcatcgacaacaaggtgctcacccggtcggataaaaatcggggcaagagcgacaacgtgcccagcgaggaggtcgtgaagaagatgaaaaactactggcgccagctcctcaacgcgaaactgatcacccagcgcaagttcgacaacctgacgaaggcggaacgcggtggcttgagcgaactcgataaggcgggcttcataaaaaggcagctggtcgagacgcgccagatcacgaagcatgtcgcccagatcctggacagccgcatgaatactaagtacgatgaaaacgacaagctgatccgggaggtgaaggtgatcacgctgaagtccaagctcgtgtcggacttccgcaaggacttccagttctacaaggtccgcgagatcaacaactaccaccacgcccacgacgcctacctgaatgcggtggtcgggaccgccctgatcaagaagtacccgaagctggagtcggagttcgtgtacggcgactacaaggtctacgacgtgcgcaaaatgatcgccaagtccgagcaggagatcggcaaggccacggcaaaatacttcttctactcgaacatcatgaacttcttcaagaccgagatcaccctcgcgaacggcgagatccgcaagcgcccgctcatcgaaaccaacggcgagacgggcgagatcgtctgggataagggccgggatttcgcgacggtccgcaaggtgctctccatgccgcaagtcaatatcgtgaaaaagacggaggtccagacgggcgggttcagcaaggagtccatcctcccgaagcgcaactccgacaagctcatcgcgaggaagaaggattgggacccgaaaaaatatggcggcttcgacagcccgaccgtcgcatacagcgtcctcgtcgtggcgaaggtggagaagggcaagtcaaagaagctcaagtccgtgaaggagctgctcgggatcacgattatggagcggtcctccttcgagaagaacccgatcgacttcctagaggccaagggatataaggaggtcaagaaggacctgattattaaactgccgaagtactcgctcttcgagctggaaaacggccgcaagaggatgctcgcctccgcaggcgagttgcagaagggcaacgagctcgccctcccgagcaaatacgtcaatttcctgtacctcgctagccactatgaaaagctcaagggcagcccggaggacaacgagcagaagcagctcttcgtggagcagcacaagcattacctggacgagatcatcgagcagatcagcgagttctcgaagcgggtgatcctcgccgacgcgaacctggacaaggtgctgtcggcatataacaagcaccgcgacaaaccaatacgcgagcaggccgaaaatatcatccacctcttcaccctcaccaacctcggcgctccggcagccttcaagtacttcgacaccacgattgaccggaagcggtacacgagcacgaaggaggtgctcgatgcgacgctgatccaccagagcatcacagggctctatgaaacacgcatcgacctgagccagctgggcggagacaagagaccacgggaccgccacgatggcgagctgggaggccgcaagcgggcaaggggaggatccagctcccaacagcaacaacagcagcaacagcagcagcagcagcagcaacagcaacagcaacagcagcagcagcagcagcagcaacagcagcaacaaacctgcgccaaggacatccagaaagcagccgccgaagcggccctcgccttccaagacgagacgtgcgatacaaccaccacgaatcatggcctcgatatggaggaaacgatggtcgaagccatctacaccccagagcagtcagaaggcgccttctacatggacgaggaaaccatgttcggcatgccgaccctcctcgacaacatggccgaaggaatgctcctcccacctccctcagttcagtggaaccacaactacgacggcgaaggcgacggagacgtttccctgtggagctactaggtaccgttaacctagacttgtccatcttctggattggccaacttaattaatgtatgaaataaaaggatgcacacatagtgacatgctaatcactataatgtgggcatcaaagttgtgtgttatgtgtaattactagttatctgaataaaagagaaagagatcatccatatttcttatcctaaatgaatgtcacgtgtctttataattctttgatgaaccagatgcatttcattaaccaaatccatatacatataaatattaatcatatataattaatatcaattgggttagcaaaacaaatctagtctaggtgtgttttgcgaatgcggcc

SEQ ID NO: 76 - DNA, 7020 bp, Artificial
  UBI  Spy dcas9 gene linked with AtCBF1 transcriptional activator by GRA
gtgcagcgtgacccggtcgtgcccctctctagagataatgagcattgcatgtctaagttataaaaaattaccacatattttttttgtcacacttgtttgaagtgcagtttatctatctttatacatatatttaaactttactctacgaataatataatctatagtactacaataatatcagtgttttagagaatcatataaatgaacagttagacatggtctaaaggacaattgagtattttgacaacaggactctacagttttatctttttagtgtgcatgtgttctcctttttttttgcaaatagcttcacctatataatacttcatccattttattagtacatccatttagggtttagggttaatggtttttatagactaatttttttagtacatctattttattctattttagcctctaaattaagaaaactaaaactctattttagtttttttatttaataatttagatataaaatagaataaaataaagtgactaaaaattaaacaaataccctttaagaaattaaaaaaactaaggaaacatttttcttgtttcgagtagataatgccagcctgttaaacgccgtcgacgagtctaacggacaccaaccagcgaaccagcagcgtcgcgtcgggccaagcgaagcagacggcacggcatctctgtcgctgcctctggacccctctcgagagttccgctccaccgttggacttgctccgctgtcggcatccagaaattgcgtggcggagcggcagacgtgagccggcacggcaggcggcctcctcctcctctcacggcaccggcagctacgggggattcctttcccaccgctccttcgctttcccttcctcgcccgccgtaataaatagacaccccctccacaccctctttccccaacctcgtgttgttcggagcgcacacacacacaaccagatctcccccaaatccacccgtcggcacctccgcttcaaggtacgccgctcgtcctcccccccccccctctctaccttctctagatcggcgttccggtccatgcatggttagggcccggtagttctacttctgttcatgtttgtgttagatccgtgtttgtgttagatccgtgctgctagcgttcgtacacggatgcgacctgtacgtcagacacgttctgattgctaacttgccagtgtttctctttggggaatcctgggatggctctagccgttccgcagacgggatcgatttcatgattttttttgtttcgttgcatagggtttggtttgcccttttcctttatttcaatatatgccgtgcacttgtttgtcgggtcatcttttcatgcttttttttgtcttggttgtgatgatgtggtctggttgggcggtcgttctagatcggagtagaattctgtttcaaactacctggtggatttattaattttggatctgtatgtgtgtgccatacatattcatagttacgaattgaagatgatggatggaaatatcgatctaggataggtatacatgttgatgcgggttttactgatgcatatacagagatgctttttgttcgcttggttgtgatgatgtggtgtggttgggcggtcgttcattcgttctagatcggagtagaatactgtttcaaactacctggtgtatttattaattttggaactgtatgtgtgtgtcatacatcttcatagttacgagtttaagatggatggaaatatcgatctaggataggtatacatgttgatgtgggttttactgatgcatatacatgatggcatatgcagcatctattcatatgctctaaccttgagtacctatctattataataaacaagtatgttttataattattttgatcttgatatacttggatgatggcatatgcagcagctatatgtggatttttttagccctgccttcatacgctatttatttgcttggtactgtttcttttgtcgatgctcaccctgttgtttggtgttacttctgcaggtcgactctagaggatccatggcaccgaagaagaagcgcaaggtgatggacaagaagtacagcatcggcctcgccatcggcaccaactcggtgggctgggccgtcatcacggacgaatataaggtcccgtcgaagaagttcaaggtcctcggcaatacagaccgccacagcatcaagaaaaacttgatcggcgccctcctgttcgatagcggcgagaccgcggaggcgaccaggctcaagaggaccgccaggagacggtacactaggcgcaagaacaggatctgctacctgcaggagatcttcagcaacgagatggcgaaggtggacgactccttcttccaccgcctggaggaatcattcctggtggaggaggacaagaagcatgagcggcacccaatcttcggcaacatcgtcgacgaggtaagtttctgcttctacctttgatatatatataataattatcattaattagtagtaatataatatttcaaatatttttttcaaaataaaagaatgtagtatatagcaattgcttttctgtagtttataagtgtgtatattttaatttataacttttctaatatatgaccaaaacatggtgatgtgcaggtggcctaccacgagaagtacccgacaatctaccacctccggaagaaactggtggacagcacagacaaggcggacctccggctcatctaccttgccctcgcgcatatgatcaagttccgcggccacttcctcatcgagggcgacctgaacccggacaactccgacgtggacaagctgttcatccagctcgtgcagacgtacaatcaactgttcgaggagaaccccataaacgctagcggcgtggacgccaaggccatcctctcggccaggctctcgaaatcaagaaggctggagaaccttatcgcgcagttgccaggcgaaaagaagaacggcctcttcggcaaccttattgcgctcagcctcggcctgacgccgaacttcaaatcaaacttcgacctcgcggaggacgccaagctccagctctcaaaggacacctacgacgacgacctcgacaacctcctggcccagataggagaccagtacgcggacctcttcctcgccgccaagaacctctccgacgctatcctgctcagcgacatccttcgggtcaacaccgaaattaccaaggcaccgctgtccgccagcatgattaaacgctacgacgagcaccatcaggacctcacgctgctcaaggcactcgtccgccagcagctccccgagaagtacaaggagatcttcttcgaccaatcaaaaaacggctacgcgggatatatcgacggcggtgccagccaggaagagttctacaagttcatcaaaccaatcctggagaagatggacggcaccgaggagttgctggtcaagctcaacagggaggacctcctcaggaagcagaggaccttcgacaacggctccatcccgcatcagatccacctgggcgaactgcatgccatcctgcggcgccaggaggacttctacccgttcctgaaggataaccgggagaagatcgagaagatcttgacgttccgcatcccatactacgtgggcccgctggctcgcggcaactcccggttcgcctggatgacccggaagtcggaggagaccatcacaccctggaactttgaggaggtggtcgataagggcgctagcgctcagagcttcatcgagcgcatgaccaacttcgataaaaacctgcccaatgaaaaagtcctccccaagcactcgctgctctacgagtacttcaccgtgtacaacgagctcaccaaggtcaaatacgtcaccgagggcatgcggaagccggcgttcctgagcggcgagcagaagaaggcgatagtggacctcctcttcaagaccaacaggaaggtgaccgtgaagcaattaaaagaggactacttcaagaaaatagagtgcttcgactccgtggagatctcgggcgtggaggatcggttcaacgcctcactcggcacgtatcacgacctcctcaagatcattaaagacaaggacttcctcgacaacgaggagaacgaggacatcctcgaggacatcgtcctcaccctgaccctgttcgaggaccgcgaaatgatcgaggagaggctgaagacctacgcgcacctgttcgacgacaaggtcatgaaacagctcaagaggcgccgctacactggttggggaaggctgtcccgcaagctcattaatggcatcagggacaagcagagcggcaagaccatcctggacttcctcaagtccgacgggttcgccaaccgcaacttcatgcagctcattcacgacgactcgctcacgttcaaggaagacatccagaaggcacaggtgagcgggcagggtgactccctccacgaacacatcgccaacctggccggctcgccggccattaaaaagggcatcctgcagacggtcaaggtcgtcgacgagctcgtgaaggtgatgggccggcacaagcccgaaaatatcgtcatagagatggccagggagaaccagaccacccaaaaagggcagaagaactcgcgcgagcggatgaaacggatcgaggagggcattaaagagctcgggtcccagatcctgaaggagcaccccgtggaaaatacccagctccagaatgaaaagctctacctctactacctgcagaacggccgcgacatgtacgtggaccaggagctggacattaatcggctatcggactacgacgtcgacgccatcgtgccgcagtcgttcctcaaggacgatagcatcgacaacaaggtgctcacccggtcggataaaaatcggggcaagagcgacaacgtgcccagcgaggaggtcgtgaagaagatgaaaaactactggcgccagctcctcaacgcgaaactgatcacccagcgcaagttcgacaacctgacgaaggcggaacgcggtggcttgagcgaactcgataaggcgggcttcataaaaaggcagctggtcgagacgcgccagatcacgaagcatgtcgcccagatcctggacagccgcatgaatactaagtacgatgaaaacgacaagctgatccgggaggtgaaggtgatcacgctgaagtccaagctcgtgtcggacttccgcaaggacttccagttctacaaggtccgcgagatcaacaactaccaccacgcccacgacgcctacctgaatgcggtggtcgggaccgccctgatcaagaagtacccgaagctggagtcggagttcgtgtacggcgactacaaggtctacgacgtgcgcaaaatgatcgccaagtccgagcaggagatcggcaaggccacggcaaaatacttcttctactcgaacatcatgaacttcttcaagaccgagatcaccctcgcgaacggcgagatccgcaagcgcccgctcatcgaaaccaacggcgagacgggcgagatcgtctgggataagggccgggatttcgcgacggtccgcaaggtgctctccatgccgcaagtcaatatcgtgaaaaagacggaggtccagacgggcgggttcagcaaggagtccatcctcccgaagcgcaactccgacaagctcatcgcgaggaagaaggattgggacccgaaaaaatatggcggcttcgacagcccgaccgtcgcatacagcgtcctcgtcgtggcgaaggtggagaagggcaagtcaaagaagctcaagtccgtgaaggagctgctcgggatcacgattatggagcggtcctccttcgagaagaacccgatcgacttcctagaggccaagggatataaggaggtcaagaaggacctgattattaaactgccgaagtactcgctcttcgagctggaaaacggccgcaagaggatgctcgcctccgcaggcgagttgcagaagggcaacgagctcgccctcccgagcaaatacgtcaatttcctgtacctcgctagccactatgaaaagctcaagggcagcccggaggacaacgagcagaagcagctcttcgtggagcagcacaagcattacctggacgagatcatcgagcagatcagcgagttctcgaagcgggtgatcctcgccgacgcgaacctggacaaggtgctgtcggcatataacaagcaccgcgacaaaccaatacgcgagcaggccgaaaatatcatccacctcttcaccctcaccaacctcggcgctccggcagccttcaagtacttcgacaccacgattgaccggaagcggtacacgagcacgaaggaggtgctcgatgcgacgctgatccaccagagcatcacagggctctatgaaacacgcatcgacctgagccagctgggcggagacaagagaccacgggaccgccacgatggcgagctgggaggccgcaagcgggcaaggggaagagcaacctgcgccaaggacatccagaaagcagccgccgaagcggccctcgccttccaagacgagacgtgcgatacaaccaccacgaatcatggcctcgatatggaggaaacgatggtcgaagccatctacaccccagagcagtcagaaggcgccttctacatggacgaggaaaccatgttcggcatgccgaccctcctcgacaacatggccgaaggaatgctcctcccacctccctcagttcagtggaaccacaactacgacggcgaaggcgacggagacgtttccctgtggagctactaggtaccgttaacctagacttgtccatcttctggattggccaacttaattaatgtatgaaataaaaggatgcacacatagtgacatgctaatcactataatgtgggcatcaaagttgtgtgttatgtgtaattactagttatctgaataaaagagaaagagatcatccatatttcttatcctaaatgaatgtcacgtgtctttataattctttgatgaaccagatgcatttcattaaccaaatccatatacatataaatattaatcatatataattaatatcaattgggttagcaaaacaaatctagtctaggtgtgttttgcgaatgcggcc

SEQ ID NO: 77 - DNA, 1000 bp, Zea mays
tgagagtacaatgatgaacctagattaatcaatgccaaagtctgaaaaatgcaccctcagtctatgatccagaaaatcaagattgcttgaggccctgttcggttgttccggattagagccccggattaattcctagccggattacttctctaatttatatagattttgatgagctggaatgaatcctggcttattccggtacaaccgaacaggccctgaaggataccagtaatcgctgagctaaattggcatgctgtcagagtgtcagtattgcagcaaggtagtgagataaccggcatcatggtgccagtttgatggcaccattagggttagagatggtggccatgggcgcatgtcctggccaactttgtatgatatatggcagggtgaataggaaagtaaaattgtattgtaaaaagggatttcttctgtttgttagcgcatgtacaaggaatgcaagttttgagcgagggggcatcaaagatctggctgtgtttccagctgtttttgttagccccatcgaatccttgacataatgatcccgcttaaataagcaacctcgcttgtatagttccttgtgctctaacacacgatgatgataagtcgtaaaatagtggtgtccaaagaatttccaggcccagttgtaaaagctaaaatgctattcgaatttctactagcagtaagtcgtgtttagaaattatttttttatataccttttttccttctatgtacagtaggacacagtgtcagcgccgcgttgacggagaatatttgcaaaaaagtaaaagagaaagtcatagcggcgtatgtgccaaaaacttcgtcacagagagggccataagaaacatggcccacggcccaatacgaagcaccgcgacgaagcccaaacagcagtccgtaggtggagcaaagcgctgggtaatacgcaaacgttttgtcccaccttgactaatcacaagagtggagcgtaccttataaaccgagccgcaagcaccgaatt

SEQ ID NO: 78 - RNA, 61 nt, Artificial
  Mature Type I-E guide RNA
  misc_feature (8)..(40): n is a, c, g, or u
gugauccnnnnnnnnnnnnnnnnnnnnnnnnnnnnnnnnnguuuuucccgcacacgcgggg

SEQ ID NO: 79 - DNA, 211 bp, Artificial
  GACT targeting CRISPR array
gtttttcccgcacacgcgggggtgatccgggcgaattgctagttagttagaccggttgtacgtttttcccgcacacgcgggggtgatcccatatgcagtcactatgaaccaactacttagatgtttttcccgcacacgcgggggtgatccttcgcccttatactgtgagtatatacagtatcagtttttcccgcacacgcgggggtgatcc

SEQ ID NO: 80 - DNA, 2557 bp, Artificial
  Maize UBI polymerase II GACT guide RNA expression cassette
gtgcagcgtgacccggtcgtgcccctctctagagataatgagcattgcatgtctaagttataaaaaattaccacatattttttttgtcacacttgtttgaagtgcagtttatctatctttatacatatatttaaactttactctacgaataatataatctatagtactacaataatatcagtgttttagagaatcatataaatgaacagttagacatggtctaaaggacaattgagtattttgacaacaggactctacagttttatctttttagtgtgcatgtgttctcctttttttttgcaaatagcttcacctatataatacttcatccattttattagtacatccatttagggtttagggttaatggtttttatagactaatttttttagtacatctattttattctattttagcctctaaattaagaaaactaaaactctattttagtttttttatttaataatttagatataaaatagaataaaataaagtgactaaaaattaaacaaataccctttaagaaattaaaaaaactaaggaaacatttttcttgtttcgagtagataatgccagcctgttaaacgccgtcgacgagtctaacggacaccaaccagcgaaccagcagcgtcgcgtcgggccaagcgaagcagacggcacggcatctctgtcgctgcctctggacccctctcgagagttccgctccaccgttggacttgctccgctgtcggcatccagaaattgcgtggcggagcggcagacgtgagccggcacggcaggcggcctcctcctcctctcacggcaccggcagctacgggggattcctttcccaccgctccttcgctttcccttcctcgcccgccgtaataaatagacaccccctccacaccctctttccccaacctcgtgttgttcggagcgcacacacacacaaccagatctcccccaaatccacccgtcggcacctccgcttcaaggtacgccgctcgtcctcccccccccccctctctaccttctctagatcggcgttccggtccatgcatggttagggcccggtagttctacttctgttcatgtttgtgttagatccgtgtttgtgttagatccgtgctgctagcgttcgtacacggatgcgacctgtacgtcagacacgttctgattgctaacttgccagtgtttctctttggggaatcctgggatggctctagccgttccgcagacgggatcgatttcatgattttttttgtttcgttgcatagggtttggtttgcccttttcctttatttcaatatatgccgtgcacttgtttgtcgggtcatcttttcatgcttttttttgtcttggttgtgatgatgtggtctggttgggcggtcgttctagatcggagtagaattctgtttcaaactacctggtggatttattaattttggatctgtatgtgtgtgccatacatattcatagttacgaattgaagatgatggatggaaatatcgatctaggataggtatacatgttgatgcgggttttactgatgcatatacagagatgctttttgttcgcttggttgtgatgatgtggtgtggttgggcggtcgttcattcgttctagatcggagtagaatactgtttcaaactacctggtgtatttattaattttggaactgtatgtgtgtgtcatacatcttcatagttacgagtttaagatggatggaaatatcgatctaggataggtatacatgttgatgtgggttttactgatgcatatacatgatggcatatgcagcatctattcatatgctctaaccttgagtacctatctattataataaacaagtatgttttataattattttgatcttgatatacttggatgatggcatatgcagcagctatatgtggatttttttagccctgccttcatacgctatttatttgcttggtactgtttcttttgtcgatgctcaccctgttgtttggtgttacttctgcaggtcgactctagaggatccatggtttttcccgcacacgcgggggtgatccgggcgaattgctagttagttagaccggttgtacgtttttcccgcacacgcgggggtgatcccatatgcagtcactatgaaccaactacttagatgtttttcccgcacacgcgggggtgatccttcgcccttatactgtgagtatatacagtatcagtttttcccgcacacgcgggggtgatcctaggtaccgttaacctagacttgtccatcttctggattggccaacttaattaatgtatgaaataaaaggatgcacacatagtgacatgctaatcactataatgtgggcatcaaagttgtgtgttatgtgtaattactagttatctgaataaaagagaaagagatcatccatatttcttatcctaaatgaatgtcacgtgtctttataattctttgatgaaccagatgcatttcattaaccaaatccatatacatataaatattaatcatatataattaatatcaattgggttagcaaaacaaatctagtctaggtgtgttttgcgaatgcggcc

SEQ ID NO: 81 - DNA, 1219 bp, Artificial
  Maize U6 polymerase III GACT guide RNA expression cassette
tgagagtacaatgatgaacctagattaatcaatgccaaagtctgaaaaatgcaccctcagtctatgatccagaaaatcaagattgcttgaggccctgttcggttgttccggattagagccccggattaattcctagccggattacttctctaatttatatagattttgatgagctggaatgaatcctggcttattccggtacaaccgaacaggccctgaaggataccagtaatcgctgagctaaattggcatgctgtcagagtgtcagtattgcagcaaggtagtgagataaccggcatcatggtgccagtttgatggcaccattagggttagagatggtggccatgggcgcatgtcctggccaactttgtatgatatatggcagggtgaataggaaagtaaaattgtattgtaaaaagggatttcttctgtttgttagcgcatgtacaaggaatgcaagttttgagcgagggggcatcaaagatctggctgtgtttccagctgtttttgttagccccatcgaatccttgacataatgatcccgcttaaataagcaacctcgcttgtatagttccttgtgctctaacacacgatgatgataagtcgtaaaatagtggtgtccaaagaatttccaggcccagttgtaaaagctaaaatgctattcgaatttctactagcagtaagtcgtgtttagaaattatttttttatataccttttttccttctatgtacagtaggacacagtgtcagcgccgcgttgacggagaatatttgcaaaaaagtaaaagagaaagtcatagcggcgtatgtgccaaaaacttcgtcacagagagggccataagaaacatggcccacggcccaatacgaagcaccgcgacgaagcccaaacagcagtccgtaggtggagcaaagcgctgggtaatacgcaaacgttttgtcccaccttgactaatcacaagagtggagcgtaccttataaaccgagccgcaagcaccgaattgtttttcccgcacacgcgggggtgatccgggcgaattgctagttagttagaccggttgtacgtttttcccgcacacgcgggggtgatcccatatgcagtcactatgaaccaactacttagatgtttttcccgcacacgcgggggtgatccttcgcccttatactgtgagtatatacagtatcagtttttcccgcacacgcgggggtgatcctttttttt

SEQ ID NO: 82 - DNA, 2781 bp, Artificial
  cas3 gene
atgaaacacattaatgactacttctgggccaaaaagaccgaggaaaatagtcgcctcctctggctccccctcacccagcacctcgaggacaccaaaaatattgccggcctcctctgggagcactggctcagcgagggccagaaggtattaattgagaacagcattaatgtcaaatcaaatatcgagaaccaaggcaagaggctcgcccagttcctcggcgccgtccacgacatcggcaaggccacccccgccttccagacccagaagggctacgccaacagcgtcgacctcgacatccagctcctcgagaagctcgagagggccggcttcagcggcatcagcagcctccagctcgcgagccccaagaagagccaccacagcatcgccggccagtacctcctcagccactacggcgtcgacgaggacatcgccaccatcatcggcggccaccacggcaggcccgtcgacgacctcgacggcctcaacagccagaagagctaccccagcaactactaccaggatgaaaagaaggacagcctcgtctaccagaagtggaagagcaatcaagaggccttcctcaactgggccctcaccgaaaccggcttcaacagcgtcagccagctccccaaaatcaaacagcccgcccaggtcatcctcagcggcctcctgatcatgagcgactggatcgccagcaacgagcacttcttccccctcctcagcctcgatgaaactgacgtcaagaacaagagccagcgcatcgaaaccggcttcaagaagtggaagaagagcaacctctggcagcccgaaaccttcgtcgacctcgtcaccctctaccaggagaggttcggcttcagcccgaggaacttccagctcatcctcagccagaccatcgaaaagaccaccaaccccggcatcgtcatcctcgaggccccgatgggcatcggcaagaccgaggccgccctcgccgtcagcgagcagctcagcagcaagaagggctgcagcggcctcttcttcggcctccccacccaggccaccagcaacggcatcttcaagcgcatcgagcagtggaccgagaatataaagggcaacaacagcgaccacttctcgatccagctcgtccacggcaaggccgccctcaacaccgactttatcgagctcctcaagggcaatacaattaatatggacgacagcgagaacggctcgatcttcgtcaacgagtggttcagcggcagaaagaccagcgcgctcgacgacttcgtcgtcggcaccgtcgaccagttcctgatggtcgccctcaagcagaagcacctcgccctccgccacctcggcttcagcaagaaggtgatcgtgatcgacgaggtccacgcctacgacgcctacatgagccagtacctcctcgaggccatcaggtggatgggcgcctacggcgtccccgtcatcatcctcagcgccaccctccccgcccagcagcgcgagaagctcataaaaagctacatggccggcatgggcgtcaagtggcgcgacatcgaaaatatagaccagataaaaatagacgcctaccccctcatcacctacaacgacggccccgacatccaccaggtcaagatgttcgagaagcaggagcagaaaaatatctacatccacaggctccccgaggagcagctcttcgacatcgtcaaggagggcctcgacaacggcggcgtcgtcggcatcatcgtcaacaccgtcaggaagagccaggagctcgcccgcaacttcagcgacatcttcggcgacgacatggtcgacctcctccacagcaacttcatcgccaccgagcgcatccgcaaggagaaggacctcctccaggagatcggcaagaaggccatccgcccccccaagaagattattatcggcacccaggtcctcgagcagagcctcgatatcgacttcgacgtcctgatcagcgacctcgcccctatggacctcctgatccagaggatcgggaggctacacaggcacaaaatcaaacgcccccagaagcacgaggtcgcccgcttctacgtcctcggcaccttcgaggagttcgacttcgacgagggcaccaggctcgtctacggcgactacctcctcgccaggacccagtacttcctccccgataaaatacgcctccccgacgacatcagccccctcgtccagaaggtctacaacagcgacctcaccatcaccttccccaagcccgagctccataaaaaatatctcgacgccaaaatagagcacgacgacaagattaaaaataaagaaaccaaggccaagagctacaggatcgccaaccccgtcctcaagaagagcagggtccgcaccaactccctcatcggctggctcaagaacctccaccccaacgacagcgaggagaaagcatatgcccaggtccgcgacatcgaggacaccgtcgaggtcatcgcattaaaaaaaataagcgacggctacggcctcttcatcgaaaataaagacatcagccagaacatcaccgaccccatcatcgccaagaaggtcgcccaaaatactctccgcctccccatgagcctcagcaaggcctacaacatcgaccagaccattaatgagctcgagagatataacaacagccacctcagccagtggcagaacagcagctggctcaagggcagcctcggcatcatcttcgataaaaacaacgagttcatcctcaacggcttcaagctcctctacgatgaaaaatatggcgtcaccatcgagaggctcgacaagaacgagagcgtctag

SEQ ID NO: 83 - DNA, 189 bp, Solanum tuberosum
gtaagtttctgcttctacctttgatatatatataataattatcattaattagtagtaatataatatttcaaatatttttttcaaaataaaagaatgtagtatatagcaattgcttttctgtagtttataagtgtgtatattttaatttataacttttctaatatatgaccaaaacatggtgatgtgcag

SEQ ID NO: 84 - DNA, 2970 bp, Artificial
  cas3 gene with ST-LS1 intron 2
atgaaacacattaatgactacttctgggccaaaaagaccgaggaaaatagtcgcctcctctggctccccctcacccagcacctcgaggacaccaaaaatattgccggcctcctctgggagcactggctcagcgaggtaagtttctgcttctacctttgatatatatataataattatcattaattagtagtaatataatatttcaaatatttttttcaaaataaaagaatgtagtatatagcaattgcttttctgtagtttataagtgtgtatattttaatttataacttttctaatatatgaccaaaacatggtgatgtgcagggccagaaggtattaattgagaacagcattaatgtcaaatcaaatatcgagaaccaaggcaagaggctcgcccagttcctcggcgccgtccacgacatcggcaaggccacccccgccttccagacccagaagggctacgccaacagcgtcgacctcgacatccagctcctcgagaagctcgagagggccggcttcagcggcatcagcagcctccagctcgcgagccccaagaagagccaccacagcatcgccggccagtacctcctcagccactacggcgtcgacgaggacatcgccaccatcatcggcggccaccacggcaggcccgtcgacgacctcgacggcctcaacagccagaagagctaccccagcaactactaccaggatgaaaagaaggacagcctcgtctaccagaagtggaagagcaatcaagaggccttcctcaactgggccctcaccgaaaccggcttcaacagcgtcagccagctccccaaaatcaaacagcccgcccaggtcatcctcagcggcctcctgatcatgagcgactggatcgccagcaacgagcacttcttccccctcctcagcctcgatgaaactgacgtcaagaacaagagccagcgcatcgaaaccggcttcaagaagtggaagaagagcaacctctggcagcccgaaaccttcgtcgacctcgtcaccctctaccaggagaggttcggcttcagcccgaggaacttccagctcatcctcagccagaccatcgaaaagaccaccaaccccggcatcgtcatcctcgaggccccgatgggcatcggcaagaccgaggccgccctcgccgtcagcgagcagctcagcagcaagaagggctgcagcggcctcttcttcggcctccccacccaggccaccagcaacggcatcttcaagcgcatcgagcagtggaccgagaatataaagggcaacaacagcgaccacttctcgatccagctcgtccacggcaaggccgccctcaacaccgactttatcgagctcctcaagggcaatacaattaatatggacgacagcgagaacggctcgatcttcgtcaacgagtggttcagcggcagaaagaccagcgcgctcgacgacttcgtcgtcggcaccgtcgaccagttcctgatggtcgccctcaagcagaagcacctcgccctccgccacctcggcttcagcaagaaggtgatcgtgatcgacgaggtccacgcctacgacgcctacatgagccagtacctcctcgaggccatcaggtggatgggcgcctacggcgtccccgtcatcatcctcagcgccaccctccccgcccagcagcgcgagaagctcataaaaagctacatggccggcatgggcgtcaagtggcgcgacatcgaaaatatagaccagataaaaatagacgcctaccccctcatcacctacaacgacggccccgacatccaccaggtcaagatgttcgagaagcaggagcagaaaaatatctacatccacaggctccccgaggagcagctcttcgacatcgtcaaggagggcctcgacaacggcggcgtcgtcggcatcatcgtcaacaccgtcaggaagagccaggagctcgcccgcaacttcagcgacatcttcggcgacgacatggtcgacctcctccacagcaacttcatcgccaccgagcgcatccgcaaggagaaggacctcctccaggagatcggcaagaaggccatccgcccccccaagaagattattatcggcacccaggtcctcgagcagagcctcgatatcgacttcgacgtcctgatcagcgacctcgcccctatggacctcctgatccagaggatcgggaggctacacaggcacaaaatcaaacgcccccagaagcacgaggtcgcccgcttctacgtcctcggcaccttcgaggagttcgacttcgacgagggcaccaggctcgtctacggcgactacctcctcgccaggacccagtacttcctccccgataaaatacgcctccccgacgacatcagccccctcgtccagaaggtctacaacagcgacctcaccatcaccttccccaagcccgagctccataaaaaatatctcgacgccaaaatagagcacgacgacaagattaaaaataaagaaaccaaggccaagagctacaggatcgccaaccccgtcctcaagaagagcagggtccgcaccaactccctcatcggctggctcaagaacctccaccccaacgacagcgaggagaaagcatatgcccaggtccgcgacatcgaggacaccgtcgaggtcatcgcattaaaaaaaataagcgacggctacggcctcttcatcgaaaataaagacatcagccagaacatcaccgaccccatcatcgccaagaaggtcgcccaaaatactctccgcctccccatgagcctcagcaaggcctacaacatcgaccagaccattaatgagctcgagagatataacaacagccacctcagccagtggcagaacagcagctggctcaagggcagcctcggcatcatcttcgataaaaacaacgagttcatcctcaacggcttcaagctcctctacgatgaaaaatatggcgtcaccatcgagaggctcgacaagaacgagagcgtctag

SEQ ID NO: 85 - DNA, 2970 bp, Artificial
  cas3 nickase gene with ST-LS1 intron 2
atgaaacacattaatgactacttctgggccaaaaagaccgaggaaaatagtcgcctcctctggctccccctcacccagcacctcgaggacaccaaaaatattgccggcctcctctgggagcactggctcagcgaggtaagtttctgcttctacctttgatatatatataataattatcattaattagtagtaatataatatttcaaatatttttttcaaaataaaagaatgtagtatatagcaattgcttttctgtagtttataagtgtgtatattttaatttataacttttctaatatatgaccaaaacatggtgatgtgcagggccagaaggtattaattgagaacagcattaatgtcaaatcaaatatcgagaaccaaggcaagaggctcgcccagttcctcggcgccgtccacgacatcggcaaggccacccccgccttccagacccagaagggctacgccaacagcgtcgacctcgacatccagctcctcgagaagctcgagagggccggcttcagcggcatcagcagcctccagctcgcgagccccaagaagagccaccacagcatcgccggccagtacctcctcagccactacggcgtcgacgaggacatcgccaccatcatcggcggccaccacggcaggcccgtcgacgacctcgacggcctcaacagccagaagagctaccccagcaactactaccaggatgaaaagaaggacagcctcgtctaccagaagtggaagagcaatcaagaggccttcctcaactgggccctcaccgaaaccggcttcaacagcgtcagccagctccccaaaatcaaacagcccgcccaggtcatcctcagcggcctcctgatcatgagcgactggatcgccagcaacgagcacttcttccccctcctcagcctcgatgaaactgacgtcaagaacaagagccagcgcatcgaaaccggcttcaagaagtggaagaagagcaacctctggcagcccgaaaccttcgtcgacctcgtcaccctctaccaggagaggttcggcttcagcccgaggaacttccagctcatcctcagccagaccatcgaaaagaccaccaaccccggcatcgtcatcctcgaggccccgatgggcatcggcaagaccgaggccgccctcgccgtcagcgagcagctcagcagcaagaagggctgcagcggcctcttcttcggcctccccacccaggccaccagcaacggcatcttcaagcgcatcgagcagtggaccgagaatataaagggcaacaacagcgaccacttctcgatccagctcgtccacggcaaggccgccctcaacaccgactttatcgagctcctcaagggcaatacaattaatatggacgacagcgagaacggctcgatcttcgtcaacgagtggttcagcggcagaaagaccagcgcgctcgacgacttcgtcgtcggcaccgtcgaccagttcctgatggtcgccctcaagcagaagcacctcgccctccgccacctcggcttcagcaagaaggtgatcgtgatcgccgaggtccacgcctacgacgcctacatgagccagtacctcctcgaggccatcaggtggatgggcgcctacggcgtccccgtcatcatcctcagcgccaccctccccgcccagcagcgcgagaagctcataaaaagctacatggccggcatgggcgtcaagtggcgcgacatcgaaaatatagaccagataaaaatagacgcctaccccctcatcacctacaacgacggccccgacatccaccaggtcaagatgttcgagaagcaggagcagaaaaatatctacatccacaggctccccgaggagcagctcttcgacatcgtcaaggagggcctcgacaacggcggcgtcgtcggcatcatcgtcaacaccgtcaggaagagccaggagctcgcccgcaacttcagcgacatcttcggcgacgacatggtcgacctcctccacagcaacttcatcgccaccgagcgcatccgcaaggagaaggacctcctccaggagatcggcaagaaggccatccgcccccccaagaagattattatcggcacccaggtcctcgagcagagcctcgatatcgacttcgacgtcctgatcagcgacctcgcccctatggacctcctgatccagaggatcgggaggctacacaggcacaaaatcaaacgcccccagaagcacgaggtcgcccgcttctacgtcctcggcaccttcgaggagttcgacttcgacgagggcaccaggctcgtctacggcgactacctcctcgccaggacccagtacttcctccccgataaaatacgcctccccgacgacatcagccccctcgtccagaaggtctacaacagcgacctcaccatcaccttccccaagcccgagctccataaaaaatatctcgacgccaaaatagagcacgacgacaagattaaaaataaagaaaccaaggccaagagctacaggatcgccaaccccgtcctcaagaagagcagggtccgcaccaactccctcatcggctggctcaagaacctccaccccaacgacagcgaggagaaagcatatgcccaggtccgcgacatcgaggacaccgtcgaggtcatcgcattaaaaaaaataagcgacggctacggcctcttcatcgaaaataaagacatcagccagaacatcaccgaccccatcatcgccaagaaggtcgcccaaaatactctccgcctccccatgagcctcagcaaggcctacaacatcgaccagaccattaatgagctcgagagatataacaacagccacctcagccagtggcagaacagcagctggctcaagggcagcctcggcatcatcttcgataaaaacaacgagttcatcctcaacggcttcaagctcctctacgatgaaaaatatggcgtcaccatcgagaggctcgacaagaacgagagcgtctag

SEQ ID NO: 86 - DNA, 2997 bp, Artificial
  cas3 with N-terminal NLS
atggcccccaagaagaagcgcaaggtcatgaaacacattaatgactacttctgggccaaaaagaccgaggaaaatagtcgcctcctctggctccccctcacccagcacctcgaggacaccaaaaatattgccggcctcctctgggagcactggctcagcgaggtaagtttctgcttctacctttgatatatatataataattatcattaattagtagtaatataatatttcaaatatttttttcaaaataaaagaatgtagtatatagcaattgcttttctgtagtttataagtgtgtatattttaatttataacttttctaatatatgaccaaaacatggtgatgtgcagggccagaaggtattaattgagaacagcattaatgtcaaatcaaatatcgagaaccaaggcaagaggctcgcccagttcctcggcgccgtccacgacatcggcaaggccacccccgccttccagacccagaagggctacgccaacagcgtcgacctcgacatccagctcctcgagaagctcgagagggccggcttcagcggcatcagcagcctccagctcgcgagccccaagaagagccaccacagcatcgccggccagtacctcctcagccactacggcgtcgacgaggacatcgccaccatcatcggcggccaccacggcaggcccgtcgacgacctcgacggcctcaacagccagaagagctaccccagcaactactaccaggatgaaaagaaggacagcctcgtctaccagaagtggaagagcaatcaagaggccttcctcaactgggccctcaccgaaaccggcttcaacagcgtcagccagctccccaaaatcaaacagcccgcccaggtcatcctcagcggcctcctgatcatgagcgactggatcgccagcaacgagcacttcttccccctcctcagcctcgatgaaactgacgtcaagaacaagagccagcgcatcgaaaccggcttcaagaagtggaagaagagcaacctctggcagcccgaaaccttcgtcgacctcgtcaccctctaccaggagaggttcggcttcagcccgaggaacttccagctcatcctcagccagaccatcgaaaagaccaccaaccccggcatcgtcatcctcgaggccccgatgggcatcggcaagaccgaggccgccctcgccgtcagcgagcagctcagcagcaagaagggctgcagcggcctcttcttcggcctccccacccaggccaccagcaacggcatcttcaagcgcatcgagcagtggaccgagaatataaagggcaacaacagcgaccacttctcgatccagctcgtccacggcaaggccgccctcaacaccgactttatcgagctcctcaagggcaatacaattaatatggacgacagcgagaacggctcgatcttcgtcaacgagtggttcagcggcagaaagaccagcgcgctcgacgacttcgtcgtcggcaccgtcgaccagttcctgatggtcgccctcaagcagaagcacctcgccctccgccacctcggcttcagcaagaaggtgatcgtgatcgacgaggtccacgcctacgacgcctacatgagccagtacctcctcgaggccatcaggtggatgggcgcctacggcgtccccgtcatcatcctcagcgccaccctccccgcccagcagcgcgagaagctcataaaaagctacatggccggcatgggcgtcaagtggcgcgacatcgaaaatatagaccagataaaaatagacgcctaccccctcatcacctacaacgacggccccgacatccaccaggtcaagatgttcgagaagcaggagcagaaaaatatctacatccacaggctccccgaggagcagctcttcgacatcgtcaaggagggcctcgacaacggcggcgtcgtcggcatcatcgtcaacaccgtcaggaagagccaggagctcgcccgcaacttcagcgacatcttcggcgacgacatggtcgacctcctccacagcaacttcatcgccaccgagcgcatccgcaaggagaaggacctcctccaggagatcggcaagaaggccatccgcccccccaagaagattattatcggcacccaggtcctcgagcagagcctcgatatcgacttcgacgtcctgatcagcgacctcgcccctatggacctcctgatccagaggatcgggaggctacacaggcacaaaatcaaacgcccccagaagcacgaggtcgcccgcttctacgtcctcggcaccttcgaggagttcgacttcgacgagggcaccaggctcgtctacggcgactacctcctcgccaggacccagtacttcctccccgataaaatacgcctccccgacgacatcagccccctcgtccagaaggtctacaacagcgacctcaccatcaccttccccaagcccgagctccataaaaaatatctcgacgccaaaatagagcacgacgacaagattaaaaataaagaaaccaaggccaagagctacaggatcgccaaccccgtcctcaagaagagcagggtccgcaccaactccctcatcggctggctcaagaacctccaccccaacgacagcgaggagaaagcatatgcccaggtccgcgacatcgaggacaccgtcgaggtcatcgcattaaaaaaaataagcgacggctacggcctcttcatcgaaaataaagacatcagccagaacatcaccgaccccatcatcgccaagaaggtcgcccaaaatactctccgcctccccatgagcctcagcaaggcctacaacatcgaccagaccattaatgagctcgagagatataacaacagccacctcagccagtggcagaacagcagctggctcaagggcagcctcggcatcatcttcgataaaaacaacgagttcatcctcaacggcttcaagctcctctacgatgaaaaatatggcgtcaccatcgagaggctcgacaagaacgagagcgtctag

SEQ ID NO: 87 - DNA, 3003 bp, Artificial
  cas3 with C-terminal NLS
atgaaacacattaatgactacttctgggccaaaaagaccgaggaaaatagtcgcctcctctggctccccctcacccagcacctcgaggacaccaaaaatattgccggcctcctctgggagcactggctcagcgaggtaagtttctgcttctacctttgatatatatataataattatcattaattagtagtaatataatatttcaaatatttttttcaaaataaaagaatgtagtatatagcaattgcttttctgtagtttataagtgtgtatattttaatttataacttttctaatatatgaccaaaacatggtgatgtgcagggccagaaggtattaattgagaacagcattaatgtcaaatcaaatatcgagaaccaaggcaagaggctcgcccagttcctcggcgccgtccacgacatcggcaaggccacccccgccttccagacccagaagggctacgccaacagcgtcgacctcgacatccagctcctcgagaagctcgagagggccggcttcagcggcatcagcagcctccagctcgcgagccccaagaagagccaccacagcatcgccggccagtacctcctcagccactacggcgtcgacgaggacatcgccaccatcatcggcggccaccacggcaggcccgtcgacgacctcgacggcctcaacagccagaagagctaccccagcaactactaccaggatgaaaagaaggacagcctcgtctaccagaagtggaagagcaatcaagaggccttcctcaactgggccctcaccgaaaccggcttcaacagcgtcagccagctccccaaaatcaaacagcccgcccaggtcatcctcagcggcctcctgatcatgagcgactggatcgccagcaacgagcacttcttccccctcctcagcctcgatgaaactgacgtcaagaacaagagccagcgcatcgaaaccggcttcaagaagtggaagaagagcaacctctggcagcccgaaaccttcgtcgacctcgtcaccctctaccaggagaggttcggcttcagcccgaggaacttccagctcatcctcagccagaccatcgaaaagaccaccaaccccggcatcgtcatcctcgaggccccgatgggcatcggcaagaccgaggccgccctcgccgtcagcgagcagctcagcagcaagaagggctgcagcggcctcttcttcggcctccccacccaggccaccagcaacggcatcttcaagcgcatcgagcagtggaccgagaatataaagggcaacaacagcgaccacttctcgatccagctcgtccacggcaaggccgccctcaacaccgactttatcgagctcctcaagggcaatacaattaatatggacgacagcgagaacggctcgatcttcgtcaacgagtggttcagcggcagaaagaccagcgcgctcgacgacttcgtcgtcggcaccgtcgaccagttcctgatggtcgccctcaagcagaagcacctcgccctccgccacctcggcttcagcaagaaggtgatcgtgatcgacgaggtccacgcctacgacgcctacatgagccagtacctcctcgaggccatcaggtggatgggcgcctacggcgtccccgtcatcatcctcagcgccaccctccccgcccagcagcgcgagaagctcataaaaagctacatggccggcatgggcgtcaagtggcgcgacatcgaaaatatagaccagataaaaatagacgcctaccccctcatcacctacaacgacggccccgacatccaccaggtcaagatgttcgagaagcaggagcagaaaaatatctacatccacaggctccccgaggagcagctcttcgacatcgtcaaggagggcctcgacaacggcggcgtcgtcggcatcatcgtcaacaccgtcaggaagagccaggagctcgcccgcaacttcagcgacatcttcggcgacgacatggtcgacctcctccacagcaacttcatcgccaccgagcgcatccgcaaggagaaggacctcctccaggagatcggcaagaaggccatccgcccccccaagaagattattatcggcacccaggtcctcgagcagagcctcgatatcgacttcgacgtcctgatcagcgacctcgcccctatggacctcctgatccagaggatcgggaggctacacaggcacaaaatcaaacgcccccagaagcacgaggtcgcccgcttctacgtcctcggcaccttcgaggagttcgacttcgacgagggcaccaggctcgtctacggcgactacctcctcgccaggacccagtacttcctccccgataaaatacgcctccccgacgacatcagccccctcgtccagaaggtctacaacagcgacctcaccatcaccttccccaagcccgagctccataaaaaatatctcgacgccaaaatagagcacgacgacaagattaaaaataaagaaaccaaggccaagagctacaggatcgccaaccccgtcctcaagaagagcagggtccgcaccaactccctcatcggctggctcaagaacctccaccccaacgacagcgaggagaaagcatatgcccaggtccgcgacatcgaggacaccgtcgaggtcatcgcattaaaaaaaataagcgacggctacggcctcttcatcgaaaataaagacatcagccagaacatcaccgaccccatcatcgccaagaaggtcgcccaaaatactctccgcctccccatgagcctcagcaaggcctacaacatcgaccagaccattaatgagctcgagagatataacaacagccacctcagccagtggcagaacagcagctggctcaagggcagcctcggcatcatcttcgataaaaacaacgagttcatcctcaacggcttcaagctcctctacgatgaaaaatatggcgtcaccatcgagaggctcgacaagaacgagagcgtcagccgcgccgaccccaagaagaagcgcaaggtctag

SEQ ID NO: 88 - DNA, 3030 bp, Artificial
  cas3 with both N- and C-terminal NLSs
atggcccccaagaagaagcgcaaggtcatgaaacacattaatgactacttctgggccaaaaagaccgaggaaaatagtcgcctcctctggctccccctcacccagcacctcgaggacaccaaaaatattgccggcctcctctgggagcactggctcagcgaggtaagtttctgcttctacctttgatatatatataataattatcattaattagtagtaatataatatttcaaatatttttttcaaaataaaagaatgtagtatatagcaattgcttttctgtagtttataagtgtgtatattttaatttataacttttctaatatatgaccaaaacatggtgatgtgcagggccagaaggtattaattgagaacagcattaatgtcaaatcaaatatcgagaaccaaggcaagaggctcgcccagttcctcggcgccgtccacgacatcggcaaggccacccccgccttccagacccagaagggctacgccaacagcgtcgacctcgacatccagctcctcgagaagctcgagagggccggcttcagcggcatcagcagcctccagctcgcgagccccaagaagagccaccacagcatcgccggccagtacctcctcagccactacggcgtcgacgaggacatcgccaccatcatcggcggccaccacggcaggcccgtcgacgacctcgacggcctcaacagccagaagagctaccccagcaactactaccaggatgaaaagaaggacagcctcgtctaccagaagtggaagagcaatcaagaggccttcctcaactgggccctcaccgaaaccggcttcaacagcgtcagccagctccccaaaatcaaacagcccgcccaggtcatcctcagcggcctcctgatcatgagcgactggatcgccagcaacgagcacttcttccccctcctcagcctcgatgaaactgacgtcaagaacaagagccagcgcatcgaaaccggcttcaagaagtggaagaagagcaacctctggcagcccgaaaccttcgtcgacctcgtcaccctctaccaggagaggttcggcttcagcccgaggaacttccagctcatcctcagccagaccatcgaaaagaccaccaaccccggcatcgtcatcctcgaggccccgatgggcatcggcaagaccgaggccgccctcgccgtcagcgagcagctcagcagcaagaagggctgcagcggcctcttcttcggcctccccacccaggccaccagcaacggcatcttcaagcgcatcgagcagtggaccgagaatataaagggcaacaacagcgaccacttctcgatccagctcgtccacggcaaggccgccctcaacaccgactttatcgagctcctcaagggcaatacaattaatatggacgacagcgagaacggctcgatcttcgtcaacgagtggttcagcggcagaaagaccagcgcgctcgacgacttcgtcgtcggcaccgtcgaccagttcctgatggtcgccctcaagcagaagcacctcgccctccgccacctcggcttcagcaagaaggtgatcgtgatcgacgaggtccacgcctacgacgcctacatgagccagtacctcctcgaggccatcaggtggatgggcgcctacggcgtccccgtcatcatcctcagcgccaccctccccgcccagcagcgcgagaagctcataaaaagctacatggccggcatgggcgtcaagtggcgcgacatcgaaaatatagaccagataaaaatagacgcctaccccctcatcacctacaacgacggccccgacatccaccaggtcaagatgttcgagaagcaggagcagaaaaatatctacatccacaggctccccgaggagcagctcttcgacatcgtcaaggagggcctcgacaacggcggcgtcgtcggcatcatcgtcaacaccgtcaggaagagccaggagctcgcccgcaacttcagcgacatcttcggcgacgacatggtcgacctcctccacagcaacttcatcgccaccgagcgcatccgcaaggagaaggacctcctccaggagatcggcaagaaggccatccgcccccccaagaagattattatcggcacccaggtcctcgagcagagcctcgatatcgacttcgacgtcctgatcagcgacctcgcccctatggacctcctgatccagaggatcgggaggctacacaggcacaaaatcaaacgcccccagaagcacgaggtcgcccgcttctacgtcctcggcaccttcgaggagttcgacttcgacgagggcaccaggctcgtctacggcgactacctcctcgccaggacccagtacttcctccccgataaaatacgcctccccgacgacatcagccccctcgtccagaaggtctacaacagcgacctcaccatcaccttccccaagcccgagctccataaaaaatatctcgacgccaaaatagagcacgacgacaagattaaaaataaagaaaccaaggccaagagctacaggatcgccaaccccgtcctcaagaagagcagggtccgcaccaactccctcatcggctggctcaagaacctccaccccaacgacagcgaggagaaagcatatgcccaggtccgcgacatcgaggacaccgtcgaggtcatcgcattaaaaaaaataagcgacggctacggcctcttcatcgaaaataaagacatcagccagaacatcaccgaccccatcatcgccaagaaggtcgcccaaaatactctccgcctccccatgagcctcagcaaggcctacaacatcgaccagaccattaatgagctcgagagatataacaacagccacctcagccagtggcagaacagcagctggctcaagggcagcctcggcatcatcttcgataaaaacaacgagttcatcctcaacggcttcaagctcctctacgatgaaaaatatggcgtcaccatcgagaggctcgacaagaacgagagcgtcagccgcgccgaccccaagaagaagcgcaaggtctag

SEQ ID NO: 89 - DNA, 2997 bp, Artificial
  cas3 nickase with N-terminal NLS
atggcccccaagaagaagcgcaaggtcatgaaacacattaatgactacttctgggccaaaaagaccgaggaaaatagtcgcctcctctggctccccctcacccagcacctcgaggacaccaaaaatattgccggcctcctctgggagcactggctcagcgaggtaagtttctgcttctacctttgatatatatataataattatcattaattagtagtaatataatatttcaaatatttttttcaaaataaaagaatgtagtatatagcaattgcttttctgtagtttataagtgtgtatattttaatttataacttttctaatatatgaccaaaacatggtgatgtgcagggccagaaggtattaattgagaacagcattaatgtcaaatcaaatatcgagaaccaaggcaagaggctcgcccagttcctcggcgccgtccacgacatcggcaaggccacccccgccttccagacccagaagggctacgccaacagcgtcgacctcgacatccagctcctcgagaagctcgagagggccggcttcagcggcatcagcagcctccagctcgcgagccccaagaagagccaccacagcatcgccggccagtacctcctcagccactacggcgtcgacgaggacatcgccaccatcatcggcggccaccacggcaggcccgtcgacgacctcgacggcctcaacagccagaagagctaccccagcaactactaccaggatgaaaagaaggacagcctcgtctaccagaagtggaagagcaatcaagaggccttcctcaactgggccctcaccgaaaccggcttcaacagcgtcagccagctccccaaaatcaaacagcccgcccaggtcatcctcagcggcctcctgatcatgagcgactggatcgccagcaacgagcacttcttccccctcctcagcctcgatgaaactgacgtcaagaacaagagccagcgcatcgaaaccggcttcaagaagtggaagaagagcaacctctggcagcccgaaaccttcgtcgacctcgtcaccctctaccaggagaggttcggcttcagcccgaggaacttccagctcatcctcagccagaccatcgaaaagaccaccaaccccggcatcgtcatcctcgaggccccgatgggcatcggcaagaccgaggccgccctcgccgtcagcgagcagctcagcagcaagaagggctgcagcggcctcttcttcggcctccccacccaggccaccagcaacggcatcttcaagcgcatcgagcagtggaccgagaatataaagggcaacaacagcgaccacttctcgatccagctcgtccacggcaaggccgccctcaacaccgactttatcgagctcctcaagggcaatacaattaatatggacgacagcgagaacggctcgatcttcgtcaacgagtggttcagcggcagaaagaccagcgcgctcgacgacttcgtcgtcggcaccgtcgaccagttcctgatggtcgccctcaagcagaagcacctcgccctccgccacctcggcttcagcaagaaggtgatcgtgatcgccgaggtccacgcctacgacgcctacatgagccagtacctcctcgaggccatcaggtggatgggcgcctacggcgtccccgtcatcatcctcagcgccaccctccccgcccagcagcgcgagaagctcataaaaagctacatggccggcatgggcgtcaagtggcgcgacatcgaaaatatagaccagataaaaatagacgcctaccccctcatcacctacaacgacggccccgacatccaccaggtcaagatgttcgagaagcaggagcagaaaaatatctacatccacaggctccccgaggagcagctcttcgacatcgtcaaggagggcctcgacaacggcggcgtcgtcggcatcatcgtcaacaccgtcaggaagagccaggagctcgcccgcaacttcagcgacatcttcggcgacgacatggtcgacctcctccacagcaacttcatcgccaccgagcgcatccgcaaggagaaggacctcctccaggagatcggcaagaaggccatccgcccccccaagaagattattatcggcacccaggtcctcgagcagagcctcgatatcgacttcgacgtcctgatcagcgacctcgcccctatggacctcctgatccagaggatcgggaggctacacaggcacaaaatcaaacgcccccagaagcacgaggtcgcccgcttctacgtcctcggcaccttcgaggagttcgacttcgacgagggcaccaggctcgtctacggcgactacctcctcgccaggacccagtacttcctccccgataaaatacgcctccccgacgacatcagccccctcgtccagaaggtctacaacagcgacctcaccatcaccttccccaagcccgagctccataaaaaatatctcgacgccaaaatagagcacgacgacaagattaaaaataaagaaaccaaggccaagagctacaggatcgccaaccccgtcctcaagaagagcagggtccgcaccaactccctcatcggctggctcaagaacctccaccccaacgacagcgaggagaaagcatatgcccaggtccgcgacatcgaggacaccgtcgaggtcatcgcattaaaaaaaataagcgacggctacggcctcttcatcgaaaataaagacatcagccagaacatcaccgaccccatcatcgccaagaaggtcgcccaaaatactctccgcctccccatgagcctcagcaaggcctacaacatcgaccagaccattaatgagctcgagagatataacaacagccacctcagccagtggcagaacagcagctggctcaagggcagcctcggcatcatcttcgataaaaacaacgagttcatcctcaacggcttcaagctcctctacgatgaaaaatatggcgtcaccatcgagaggctcgacaagaacgagagcgtctag

SEQ ID NO: 90 - DNA, 3003 bp, Artificial
  cas3 nickase with C-terminal NLS
atgaaacacattaatgactacttctgggccaaaaagaccgaggaaaatagtcgcctcctctggctccccctcacccagcacctcgaggacaccaaaaatattgccggcctcctctgggagcactggctcagcgaggtaagtttctgcttctacctttgatatatatataataattatcattaattagtagtaatataatatttcaaatatttttttcaaaataaaagaatgtagtatatagcaattgcttttctgtagtttataagtgtgtatattttaatttataacttttctaatatatgaccaaaacatggtgatgtgcagggccagaaggtattaattgagaacagcattaatgtcaaatcaaatatcgagaaccaaggcaagaggctcgcccagttcctcggcgccgtccacgacatcggcaaggccacccccgccttccagacccagaagggctacgccaacagcgtcgacctcgacatccagctcctcgagaagctcgagagggccggcttcagcggcatcagcagcctccagctcgcgagccccaagaagagccaccacagcatcgccggccagtacctcctcagccactacggcgtcgacgaggacatcgccaccatcatcggcggccaccacggcaggcccgtcgacgacctcgacggcctcaacagccagaagagctaccccagcaactactaccaggatgaaaagaaggacagcctcgtctaccagaagtggaagagcaatcaagaggccttcctcaactgggccctcaccgaaaccggcttcaacagcgtcagccagctccccaaaatcaaacagcccgcccaggtcatcctcagcggcctcctgatcatgagcgactggatcgccagcaacgagcacttcttccccctcctcagcctcgatgaaactgacgtcaagaacaagagccagcgcatcgaaaccggcttcaagaagtggaagaagagcaacctctggcagcccgaaaccttcgtcgacctcgtcaccctctaccaggagaggttcggcttcagcccgaggaacttccagctcatcctcagccagaccatcgaaaagaccaccaaccccggcatcgtcatcctcgaggccccgatgggcatcggcaagaccgaggccgccctcgccgtcagcgagcagctcagcagcaagaagggctgcagcggcctcttcttcggcctccccacccaggccaccagcaacggcatcttcaagcgcatcgagcagtggaccgagaatataaagggcaacaacagcgaccacttctcgatccagctcgtccacggcaaggccgccctcaacaccgactttatcgagctcctcaagggcaatacaattaatatggacgacagcgagaacggctcgatcttcgtcaacgagtggttcagcggcagaaagaccagcgcgctcgacgacttcgtcgtcggcaccgtcgaccagttcctgatggtcgccctcaagcagaagcacctcgccctccgccacctcggcttcagcaagaaggtgatcgtgatcgccgaggtccacgcctacgacgcctacatgagccagtacctcctcgaggccatcaggtggatgggcgcctacggcgtccccgtcatcatcctcagcgccaccctccccgcccagcagcgcgagaagctcataaaaagctacatggccggcatgggcgtcaagtggcgcgacatcgaaaatatagaccagataaaaatagacgcctaccccctcatcacctacaacgacggccccgacatccaccaggtcaagatgttcgagaagcaggagcagaaaaatatctacatccacaggctccccgaggagcagctcttcgacatcgtcaaggagggcctcgacaacggcggcgtcgtcggcatcatcgtcaacaccgtcaggaagagccaggagctcgcccgcaacttcagcgacatcttcggcgacgacatggtcgacctcctccacagcaacttcatcgccaccgagcgcatccgcaaggagaaggacctcctccaggagatcggcaagaaggccatccgcccccccaagaagattattatcggcacccaggtcctcgagcagagcctcgatatcgacttcgacgtcctgatcagcgacctcgcccctatggacctcctgatccagaggatcgggaggctacacaggcacaaaatcaaacgcccccagaagcacgaggtcgcccgcttctacgtcctcggcaccttcgaggagttcgacttcgacgagggcaccaggctcgtctacggcgactacctcctcgccaggacccagtacttcctccccgataaaatacgcctccccgacgacatcagccccctcgtccagaaggtctacaacagcgacctcaccatcaccttccccaagcccgagctccataaaaaatatctcgacgccaaaatagagcacgacgacaagattaaaaataaagaaaccaaggccaagagctacaggatcgccaaccccgtcctcaagaagagcagggtccgcaccaactccctcatcggctggctcaagaacctccaccccaacgacagcgaggagaaagcatatgcccaggtccgcgacatcgaggacaccgtcgaggtcatcgcattaaaaaaaataagcgacggctacggcctcttcatcgaaaataaagacatcagccagaacatcaccgaccccatcatcgccaagaaggtcgcccaaaatactctccgcctccccatgagcctcagcaaggcctacaacatcgaccagaccattaatgagctcgagagatataacaacagccacctcagccagtggcagaacagcagctggctcaagggcagcctcggcatcatcttcgataaaaacaacgagttcatcctcaacggcttcaagctcctctacgatgaaaaatatggcgtcaccatcgagaggctcgacaagaacgagagcgtcagccgcgccgaccccaagaagaagcgcaaggtctag

SEQ ID NO: 91 - DNA, 3030 bp, Artificial
  cas3 nickase with both N- and C-terminal NLSs
atggcccccaagaagaagcgcaaggtcatgaaacacattaatgactacttctgggccaaaaagaccgaggaaaatagtcgcctcctctggctccccctcacccagcacctcgaggacaccaaaaatattgccggcctcctctgggagcactggctcagcgaggtaagtttctgcttctacctttgatatatatataataattatcattaattagtagtaatataatatttcaaatatttttttcaaaataaaagaatgtagtatatagcaattgcttttctgtagtttataagtgtgtatattttaatttataacttttctaatatatgaccaaaacatggtgatgtgcagggccagaaggtattaattgagaacagcattaatgtcaaatcaaatatcgagaaccaaggcaagaggctcgcccagttcctcggcgccgtccacgacatcggcaaggccacccccgccttccagacccagaagggctacgccaacagcgtcgacctcgacatccagctcctcgagaagctcgagagggccggcttcagcggcatcagcagcctccagctcgcgagccccaagaagagccaccacagcatcgccggccagtacctcctcagccactacggcgtcgacgaggacatcgccaccatcatcggcggccaccacggcaggcccgtcgacgacctcgacggcctcaacagccagaagagctaccccagcaactactaccaggatgaaaagaaggacagcctcgtctaccagaagtggaagagcaatcaagaggccttcctcaactgggccctcaccgaaaccggcttcaacagcgtcagccagctccccaaaatcaaacagcccgcccaggtcatcctcagcggcctcctgatcatgagcgactggatcgccagcaacgagcacttcttccccctcctcagcctcgatgaaactgacgtcaagaacaagagccagcgcatcgaaaccggcttcaagaagtggaagaagagcaacctctggcagcccgaaaccttcgtcgacctcgtcaccctctaccaggagaggttcggcttcagcccgaggaacttccagctcatcctcagccagaccatcgaaaagaccaccaaccccggcatcgtcatcctcgaggccccgatgggcatcggcaagaccgaggccgccctcgccgtcagcgagcagctcagcagcaagaagggctgcagcggcctcttcttcggcctccccacccaggccaccagcaacggcatcttcaagcgcatcgagcagtggaccgagaatataaagggcaacaacagcgaccacttctcgatccagctcgtccacggcaaggccgccctcaacaccgactttatcgagctcctcaagggcaatacaattaatatggacgacagcgagaacggctcgatcttcgtcaacgagtggttcagcggcagaaagaccagcgcgctcgacgacttcgtcgtcggcaccgtcgaccagttcctgatggtcgccctcaagcagaagcacctcgccctccgccacctcggcttcagcaagaaggtgatcgtgatcgccgaggtccacgcctacgacgcctacatgagccagtacctcctcgaggccatcaggtggatgggcgcctacggcgtccccgtcatcatcctcagcgccaccctccccgcccagcagcgcgagaagctcataaaaagctacatggccggcatgggcgtcaagtggcgcgacatcgaaaatatagaccagataaaaatagacgcctaccccctcatcacctacaacgacggccccgacatccaccaggtcaagatgttcgagaagcaggagcagaaaaatatctacatccacaggctccccgaggagcagctcttcgacatcgtcaaggagggcctcgacaacggcggcgtcgtcggcatcatcgtcaacaccgtcaggaagagccaggagctcgcccgcaacttcagcgacatcttcggcgacgacatggtcgacctcctccacagcaacttcatcgccaccgagcgcatccgcaaggagaaggacctcctccaggagatcggcaagaaggccatccgcccccccaagaagattattatcggcacccaggtcctcgagcagagcctcgatatcgacttcgacgtcctgatcagcgacctcgcccctatggacctcctgatccagaggatcgggaggctacacaggcacaaaatcaaacgcccccagaagcacgaggtcgcccgcttctacgtcctcggcaccttcgaggagttcgacttcgacgagggcaccaggctcgtctacggcgactacctcctcgccaggacccagtacttcctccccgataaaatacgcctccccgacgacatcagccccctcgtccagaaggtctacaacagcgacctcaccatcaccttccccaagcccgagctccataaaaaatatctcgacgccaaaatagagcacgacgacaagattaaaaataaagaaaccaaggccaagagctacaggatcgccaaccccgtcctcaagaagagcagggtccgcaccaactccctcatcggctggctcaagaacctccaccccaacgacagcgaggagaaagcatatgcccaggtccgcgacatcgaggacaccgtcgaggtcatcgcattaaaaaaaataagcgacggctacggcctcttcatcgaaaataaagacatcagccagaacatcaccgaccccatcatcgccaagaaggtcgcccaaaatactctccgcctccccatgagcctcagcaaggcctacaacatcgaccagaccattaatgagctcgagagatataacaacagccacctcagccagtggcagaacagcagctggctcaagggcagcctcggcatcatcttcgataaaaacaacgagttcatcctcaacggcttcaagctcctctacgatgaaaaatatggcgtcaccatcgagaggctcgacaagaacgagagcgtcagccgcgccgaccccaagaagaagcgcaaggtctag

SEQ ID NO: 92 - protein, 935 aa, Artificial
  protein of  cas3 with N-terminal NLS
MAPKKKRKVMKHINDYFWAKKTEENSRLLWLPLTQHLEDTKNIAGLLWEHWLSEGQKVLIENSINVKSNIENQGKRLAQFLGAVHDIGKATPAFQTQKGYANSVDLDIQLLEKLERAGFSGISSLQLASPKKSHHSIAGQYLLSHYGVDEDIATIIGGHHGRPVDDLDGLNSQKSYPSNYYQDEKKDSLVYQKWKSNQEAFLNWALTETGFNSVSQLPKIKQPAQVILSGLLIMSDWIASNEHFFPLLSLDETDVKNKSQRIETGFKKWKKSNLWQPETFVDLVTLYQERFGFSPRNFQLILSQTIEKTTNPGIVILEAPMGIGKTEAALAVSEQLSSKKGCSGLFFGLPTQATSNGIFKRIEQWTENIKGNNSDHFSIQLVHGKAALNTDFIELLKGNTINMDDSENGSIFVNEWFSGRKTSALDDFVVGTVDQFLMVALKQKHLALRHLGFSKKVIVIDEVHAYDAYMSQYLLEAIRWMGAYGVPVIILSATLPAQQREKLIKSYMAGMGVKWRDIENIDQIKIDAYPLITYNDGPDIHQVKMFEKQEQKNIYIHRLPEEQLFDIVKEGLDNGGVVGIIVNTVRKSQELARNFSDIFGDDMVDLLHSNFIATERIRKEKDLLQEIGKKAIRPPKKIIIGTQVLEQSLDIDFDVLISDLAPMDLLIQRIGRLHRHKIKRPQKHEVARFYVLGTFEEFDFDEGTRLVYGDYLLARTQYFLPDKIRLPDDISPLVQKVYNSDLTITFPKPELHKKYLDAKIEHDDKIKNKETKAKSYRIANPVLKKSRVRTNSLIGWLKNLHPNDSEEKAYAQVRDIEDTVEVIALKKISDGYGLFIENKDISQNITDPIIAKKVAQNTLRLPMSLSKAYNIDQTINELERYNNSHLSQWQNSSWLKGSLGIIFDKNNEFILNGFKLLYDEKYGVTIERLDKNESV

SEQ ID NO: 93 - protein, 937 aa, Artificial
  protein of  cas3 with C-terminal NLS
MKHINDYFWAKKTEENSRLLWLPLTQHLEDTKNIAGLLWEHWLSEGQKVLIENSINVKSNIENQGKRLAQFLGAVHDIGKATPAFQTQKGYANSVDLDIQLLEKLERAGFSGISSLQLASPKKSHHSIAGQYLLSHYGVDEDIATIIGGHHGRPVDDLDGLNSQKSYPSNYYQDEKKDSLVYQKWKSNQEAFLNWALTETGFNSVSQLPKIKQPAQVILSGLLIMSDWIASNEHFFPLLSLDETDVKNKSQRIETGFKKWKKSNLWQPETFVDLVTLYQERFGFSPRNFQLILSQTIEKTTNPGIVILEAPMGIGKTEAALAVSEQLSSKKGCSGLFFGLPTQATSNGIFKRIEQWTENIKGNNSDHFSIQLVHGKAALNTDFIELLKGNTINMDDSENGSIFVNEWFSGRKTSALDDFVVGTVDQFLMVALKQKHLALRHLGFSKKVIVIDEVHAYDAYMSQYLLEAIRWMGAYGVPVIILSATLPAQQREKLIKSYMAGMGVKWRDIENIDQIKIDAYPLITYNDGPDIHQVKMFEKQEQKNIYIHRLPEEQLFDIVKEGLDNGGVVGIIVNTVRKSQELARNFSDIFGDDMVDLLHSNFIATERIRKEKDLLQEIGKKAIRPPKKIIIGTQVLEQSLDIDFDVLISDLAPMDLLIQRIGRLHRHKIKRPQKHEVARFYVLGTFEEFDFDEGTRLVYGDYLLARTQYFLPDKIRLPDDISPLVQKVYNSDLTITFPKPELHKKYLDAKIEHDDKIKNKETKAKSYRIANPVLKKSRVRTNSLIGWLKNLHPNDSEEKAYAQVRDIEDTVEVIALKKISDGYGLFIENKDISQNITDPIIAKKVAQNTLRLPMSLSKAYNIDQTINELERYNNSHLSQWQNSSWLKGSLGIIFDKNNEFILNGFKLLYDEKYGVTIERLDKNESVSRADPKKKRKV

SEQ ID NO: 94 - protein, 946 aa, Artificial
  protein of  cas3 with both N- and C-terminal NLSs
MAPKKKRKVMKHINDYFWAKKTEENSRLLWLPLTQHLEDTKNIAGLLWEHWLSEGQKVLIENSINVKSNIENQGKRLAQFLGAVHDIGKATPAFQTQKGYANSVDLDIQLLEKLERAGFSGISSLQLASPKKSHHSIAGQYLLSHYGVDEDIATIIGGHHGRPVDDLDGLNSQKSYPSNYYQDEKKDSLVYQKWKSNQEAFLNWALTETGFNSVSQLPKIKQPAQVILSGLLIMSDWIASNEHFFPLLSLDETDVKNKSQRIETGFKKWKKSNLWQPETFVDLVTLYQERFGFSPRNFQLILSQTIEKTTNPGIVILEAPMGIGKTEAALAVSEQLSSKKGCSGLFFGLPTQATSNGIFKRIEQWTENIKGNNSDHFSIQLVHGKAALNTDFIELLKGNTINMDDSENGSIFVNEWFSGRKTSALDDFVVGTVDQFLMVALKQKHLALRHLGFSKKVIVIDEVHAYDAYMSQYLLEAIRWMGAYGVPVIILSATLPAQQREKLIKSYMAGMGVKWRDIENIDQIKIDAYPLITYNDGPDIHQVKMFEKQEQKNIYIHRLPEEQLFDIVKEGLDNGGVVGIIVNTVRKSQELARNFSDIFGDDMVDLLHSNFIATERIRKEKDLLQEIGKKAIRPPKKIIIGTQVLEQSLDIDFDVLISDLAPMDLLIQRIGRLHRHKIKRPQKHEVARFYVLGTFEEFDFDEGTRLVYGDYLLARTQYFLPDKIRLPDDISPLVQKVYNSDLTITFPKPELHKKYLDAKIEHDDKIKNKETKAKSYRIANPVLKKSRVRTNSLIGWLKNLHPNDSEEKAYAQVRDIEDTVEVIALKKISDGYGLFIENKDISQNITDPIIAKKVAQNTLRLPMSLSKAYNIDQTINELERYNNSHLSQWQNSSWLKGSLGIIFDKNNEFILNGFKLLYDEKYGVTIERLDKNESVSRADPKKKRKV

SEQ ID NO: 95 - protein, 935 aa, Artificial
  protein of  cas3 nickase with N-terminal NLS
MAPKKKRKVMKHINDYFWAKKTEENSRLLWLPLTQHLEDTKNIAGLLWEHWLSEGQKVLIENSINVKSNIENQGKRLAQFLGAVHDIGKATPAFQTQKGYANSVDLDIQLLEKLERAGFSGISSLQLASPKKSHHSIAGQYLLSHYGVDEDIATIIGGHHGRPVDDLDGLNSQKSYPSNYYQDEKKDSLVYQKWKSNQEAFLNWALTETGFNSVSQLPKIKQPAQVILSGLLIMSDWIASNEHFFPLLSLDETDVKNKSQRIETGFKKWKKSNLWQPETFVDLVTLYQERFGFSPRNFQLILSQTIEKTTNPGIVILEAPMGIGKTEAALAVSEQLSSKKGCSGLFFGLPTQATSNGIFKRIEQWTENIKGNNSDHFSIQLVHGKAALNTDFIELLKGNTINMDDSENGSIFVNEWFSGRKTSALDDFVVGTVDQFLMVALKQKHLALRHLGFSKKVIVIAEVHAYDAYMSQYLLEAIRWMGAYGVPVIILSATLPAQQREKLIKSYMAGMGVKWRDIENIDQIKIDAYPLITYNDGPDIHQVKMFEKQEQKNIYIHRLPEEQLFDIVKEGLDNGGVVGIIVNTVRKSQELARNFSDIFGDDMVDLLHSNFIATERIRKEKDLLQEIGKKAIRPPKKIIIGTQVLEQSLDIDFDVLISDLAPMDLLIQRIGRLHRHKIKRPQKHEVARFYVLGTFEEFDFDEGTRLVYGDYLLARTQYFLPDKIRLPDDISPLVQKVYNSDLTITFPKPELHKKYLDAKIEHDDKIKNKETKAKSYRIANPVLKKSRVRTNSLIGWLKNLHPNDSEEKAYAQVRDIEDTVEVIALKKISDGYGLFIENKDISQNITDPIIAKKVAQNTLRLPMSLSKAYNIDQTINELERYNNSHLSQWQNSSWLKGSLGIIFDKNNEFILNGFKLLYDEKYGVTIERLDKNESV

SEQ ID NO: 96 - protein, 937 aa, Artificial
  protein of  cas3 nickase with C-terminal NLS
MKHINDYFWAKKTEENSRLLWLPLTQHLEDTKNIAGLLWEHWLSEGQKVLIENSINVKSNIENQGKRLAQFLGAVHDIGKATPAFQTQKGYANSVDLDIQLLEKLERAGFSGISSLQLASPKKSHHSIAGQYLLSHYGVDEDIATIIGGHHGRPVDDLDGLNSQKSYPSNYYQDEKKDSLVYQKWKSNQEAFLNWALTETGFNSVSQLPKIKQPAQVILSGLLIMSDWIASNEHFFPLLSLDETDVKNKSQRIETGFKKWKKSNLWQPETFVDLVTLYQERFGFSPRNFQLILSQTIEKTTNPGIVILEAPMGIGKTEAALAVSEQLSSKKGCSGLFFGLPTQATSNGIFKRIEQWTENIKGNNSDHFSIQLVHGKAALNTDFIELLKGNTINMDDSENGSIFVNEWFSGRKTSALDDFVVGTVDQFLMVALKQKHLALRHLGFSKKVIVIAEVHAYDAYMSQYLLEAIRWMGAYGVPVIILSATLPAQQREKLIKSYMAGMGVKWRDIENIDQIKIDAYPLITYNDGPDIHQVKMFEKQEQKNIYIHRLPEEQLFDIVKEGLDNGGVVGIIVNTVRKSQELARNFSDIFGDDMVDLLHSNFIATERIRKEKDLLQEIGKKAIRPPKKIIIGTQVLEQSLDIDFDVLISDLAPMDLLIQRIGRLHRHKIKRPQKHEVARFYVLGTFEEFDFDEGTRLVYGDYLLARTQYFLPDKIRLPDDISPLVQKVYNSDLTITFPKPELHKKYLDAKIEHDDKIKNKETKAKSYRIANPVLKKSRVRTNSLIGWLKNLHPNDSEEKAYAQVRDIEDTVEVIALKKISDGYGLFIENKDISQNITDPIIAKKVAQNTLRLPMSLSKAYNIDQTINELERYNNSHLSQWQNSSWLKGSLGIIFDKNNEFILNGFKLLYDEKYGVTIERLDKNESVSRADPKKKRKV

SEQ ID NO: 97 - protein, 946 aa, Artificial
  protein of  cas3 nickase with both N- and C-terminal NLSs
MAPKKKRKVMKHINDYFWAKKTEENSRLLWLPLTQHLEDTKNIAGLLWEHWLSEGQKVLIENSINVKSNIENQGKRLAQFLGAVHDIGKATPAFQTQKGYANSVDLDIQLLEKLERAGFSGISSLQLASPKKSHHSIAGQYLLSHYGVDEDIATIIGGHHGRPVDDLDGLNSQKSYPSNYYQDEKKDSLVYQKWKSNQEAFLNWALTETGFNSVSQLPKIKQPAQVILSGLLIMSDWIASNEHFFPLLSLDETDVKNKSQRIETGFKKWKKSNLWQPETFVDLVTLYQERFGFSPRNFQLILSQTIEKTTNPGIVILEAPMGIGKTEAALAVSEQLSSKKGCSGLFFGLPTQATSNGIFKRIEQWTENIKGNNSDHFSIQLVHGKAALNTDFIELLKGNTINMDDSENGSIFVNEWFSGRKTSALDDFVVGTVDQFLMVALKQKHLALRHLGFSKKVIVIAEVHAYDAYMSQYLLEAIRWMGAYGVPVIILSATLPAQQREKLIKSYMAGMGVKWRDIENIDQIKIDAYPLITYNDGPDIHQVKMFEKQEQKNIYIHRLPEEQLFDIVKEGLDNGGVVGIIVNTVRKSQELARNFSDIFGDDMVDLLHSNFIATERIRKEKDLLQEIGKKAIRPPKKIIIGTQVLEQSLDIDFDVLISDLAPMDLLIQRIGRLHRHKIKRPQKHEVARFYVLGTFEEFDFDEGTRLVYGDYLLARTQYFLPDKIRLPDDISPLVQKVYNSDLTITFPKPELHKKYLDAKIEHDDKIKNKETKAKSYRIANPVLKKSRVRTNSLIGWLKNLHPNDSEEKAYAQVRDIEDTVEVIALKKISDGYGLFIENKDISQNITDPIIAKKVAQNTLRLPMSLSKAYNIDQTINELERYNNSHLSQWQNSSWLKGSLGIIFDKNNEFILNGFKLLYDEKYGVTIERLDKNESVSRADPKKKRKV

SEQ ID NO: 98 - DNA, 5331 bp, Artificial
  UBI  cas3 with N-terminal NLS
gtgcagcgtgacccggtcgtgcccctctctagagataatgagcattgcatgtctaagttataaaaaattaccacatattttttttgtcacacttgtttgaagtgcagtttatctatctttatacatatatttaaactttactctacgaataatataatctatagtactacaataatatcagtgttttagagaatcatataaatgaacagttagacatggtctaaaggacaattgagtattttgacaacaggactctacagttttatctttttagtgtgcatgtgttctcctttttttttgcaaatagcttcacctatataatacttcatccattttattagtacatccatttagggtttagggttaatggtttttatagactaatttttttagtacatctattttattctattttagcctctaaattaagaaaactaaaactctattttagtttttttatttaataatttagatataaaatagaataaaataaagtgactaaaaattaaacaaataccctttaagaaattaaaaaaactaaggaaacatttttcttgtttcgagtagataatgccagcctgttaaacgccgtcgacgagtctaacggacaccaaccagcgaaccagcagcgtcgcgtcgggccaagcgaagcagacggcacggcatctctgtcgctgcctctggacccctctcgagagttccgctccaccgttggacttgctccgctgtcggcatccagaaattgcgtggcggagcggcagacgtgagccggcacggcaggcggcctcctcctcctctcacggcaccggcagctacgggggattcctttcccaccgctccttcgctttcccttcctcgcccgccgtaataaatagacaccccctccacaccctctttccccaacctcgtgttgttcggagcgcacacacacacaaccagatctcccccaaatccacccgtcggcacctccgcttcaaggtacgccgctcgtcctcccccccccccctctctaccttctctagatcggcgttccggtccatgcatggttagggcccggtagttctacttctgttcatgtttgtgttagatccgtgtttgtgttagatccgtgctgctagcgttcgtacacggatgcgacctgtacgtcagacacgttctgattgctaacttgccagtgtttctctttggggaatcctgggatggctctagccgttccgcagacgggatcgatttcatgattttttttgtttcgttgcatagggtttggtttgcccttttcctttatttcaatatatgccgtgcacttgtttgtcgggtcatcttttcatgcttttttttgtcttggttgtgatgatgtggtctggttgggcggtcgttctagatcggagtagaattctgtttcaaactacctggtggatttattaattttggatctgtatgtgtgtgccatacatattcatagttacgaattgaagatgatggatggaaatatcgatctaggataggtatacatgttgatgcgggttttactgatgcatatacagagatgctttttgttcgcttggttgtgatgatgtggtgtggttgggcggtcgttcattcgttctagatcggagtagaatactgtttcaaactacctggtgtatttattaattttggaactgtatgtgtgtgtcatacatcttcatagttacgagtttaagatggatggaaatatcgatctaggataggtatacatgttgatgtgggttttactgatgcatatacatgatggcatatgcagcatctattcatatgctctaaccttgagtacctatctattataataaacaagtatgttttataattattttgatcttgatatacttggatgatggcatatgcagcagctatatgtggatttttttagccctgccttcatacgctatttatttgcttggtactgtttcttttgtcgatgctcaccctgttgtttggtgttacttctgcaggtcgactctagaggatccatggcccccaagaagaagcgcaaggtcatgaaacacattaatgactacttctgggccaaaaagaccgaggaaaatagtcgcctcctctggctccccctcacccagcacctcgaggacaccaaaaatattgccggcctcctctgggagcactggctcagcgaggtaagtttctgcttctacctttgatatatatataataattatcattaattagtagtaatataatatttcaaatatttttttcaaaataaaagaatgtagtatatagcaattgcttttctgtagtttataagtgtgtatattttaatttataacttttctaatatatgaccaaaacatggtgatgtgcagggccagaaggtattaattgagaacagcattaatgtcaaatcaaatatcgagaaccaaggcaagaggctcgcccagttcctcggcgccgtccacgacatcggcaaggccacccccgccttccagacccagaagggctacgccaacagcgtcgacctcgacatccagctcctcgagaagctcgagagggccggcttcagcggcatcagcagcctccagctcgcgagccccaagaagagccaccacagcatcgccggccagtacctcctcagccactacggcgtcgacgaggacatcgccaccatcatcggcggccaccacggcaggcccgtcgacgacctcgacggcctcaacagccagaagagctaccccagcaactactaccaggatgaaaagaaggacagcctcgtctaccagaagtggaagagcaatcaagaggccttcctcaactgggccctcaccgaaaccggcttcaacagcgtcagccagctccccaaaatcaaacagcccgcccaggtcatcctcagcggcctcctgatcatgagcgactggatcgccagcaacgagcacttcttccccctcctcagcctcgatgaaactgacgtcaagaacaagagccagcgcatcgaaaccggcttcaagaagtggaagaagagcaacctctggcagcccgaaaccttcgtcgacctcgtcaccctctaccaggagaggttcggcttcagcccgaggaacttccagctcatcctcagccagaccatcgaaaagaccaccaaccccggcatcgtcatcctcgaggccccgatgggcatcggcaagaccgaggccgccctcgccgtcagcgagcagctcagcagcaagaagggctgcagcggcctcttcttcggcctccccacccaggccaccagcaacggcatcttcaagcgcatcgagcagtggaccgagaatataaagggcaacaacagcgaccacttctcgatccagctcgtccacggcaaggccgccctcaacaccgactttatcgagctcctcaagggcaatacaattaatatggacgacagcgagaacggctcgatcttcgtcaacgagtggttcagcggcagaaagaccagcgcgctcgacgacttcgtcgtcggcaccgtcgaccagttcctgatggtcgccctcaagcagaagcacctcgccctccgccacctcggcttcagcaagaaggtgatcgtgatcgacgaggtccacgcctacgacgcctacatgagccagtacctcctcgaggccatcaggtggatgggcgcctacggcgtccccgtcatcatcctcagcgccaccctccccgcccagcagcgcgagaagctcataaaaagctacatggccggcatgggcgtcaagtggcgcgacatcgaaaatatagaccagataaaaatagacgcctaccccctcatcacctacaacgacggccccgacatccaccaggtcaagatgttcgagaagcaggagcagaaaaatatctacatccacaggctccccgaggagcagctcttcgacatcgtcaaggagggcctcgacaacggcggcgtcgtcggcatcatcgtcaacaccgtcaggaagagccaggagctcgcccgcaacttcagcgacatcttcggcgacgacatggtcgacctcctccacagcaacttcatcgccaccgagcgcatccgcaaggagaaggacctcctccaggagatcggcaagaaggccatccgcccccccaagaagattattatcggcacccaggtcctcgagcagagcctcgatatcgacttcgacgtcctgatcagcgacctcgcccctatggacctcctgatccagaggatcgggaggctacacaggcacaaaatcaaacgcccccagaagcacgaggtcgcccgcttctacgtcctcggcaccttcgaggagttcgacttcgacgagggcaccaggctcgtctacggcgactacctcctcgccaggacccagtacttcctccccgataaaatacgcctccccgacgacatcagccccctcgtccagaaggtctacaacagcgacctcaccatcaccttccccaagcccgagctccataaaaaatatctcgacgccaaaatagagcacgacgacaagattaaaaataaagaaaccaaggccaagagctacaggatcgccaaccccgtcctcaagaagagcagggtccgcaccaactccctcatcggctggctcaagaacctccaccccaacgacagcgaggagaaagcatatgcccaggtccgcgacatcgaggacaccgtcgaggtcatcgcattaaaaaaaataagcgacggctacggcctcttcatcgaaaataaagacatcagccagaacatcaccgaccccatcatcgccaagaaggtcgcccaaaatactctccgcctccccatgagcctcagcaaggcctacaacatcgaccagaccattaatgagctcgagagatataacaacagccacctcagccagtggcagaacagcagctggctcaagggcagcctcggcatcatcttcgataaaaacaacgagttcatcctcaacggcttcaagctcctctacgatgaaaaatatggcgtcaccatcgagaggctcgacaagaacgagagcgtctagttaacctagacttgtccatcttctggattggccaacttaattaatgtatgaaataaaaggatgcacacatagtgacatgctaatcactataatgtgggcatcaaagttgtgtgttatgtgtaattactagttatctgaataaaagagaaagagatcatccatatttcttatcctaaatgaatgtcacgtgtctttataattctttgatgaaccagatgcatttcattaaccaaatccatatacatataaatattaatcatatataattaatatcaattgggttagcaaaacaaatctagtctaggtgtgttttgcgaatgcggcc

SEQ ID NO: 99 - DNA, 5337 bp, Artificial
  UBI  cas3 with C-terminal NLS
gtgcagcgtgacccggtcgtgcccctctctagagataatgagcattgcatgtctaagttataaaaaattaccacatattttttttgtcacacttgtttgaagtgcagtttatctatctttatacatatatttaaactttactctacgaataatataatctatagtactacaataatatcagtgttttagagaatcatataaatgaacagttagacatggtctaaaggacaattgagtattttgacaacaggactctacagttttatctttttagtgtgcatgtgttctcctttttttttgcaaatagcttcacctatataatacttcatccattttattagtacatccatttagggtttagggttaatggtttttatagactaatttttttagtacatctattttattctattttagcctctaaattaagaaaactaaaactctattttagtttttttatttaataatttagatataaaatagaataaaataaagtgactaaaaattaaacaaataccctttaagaaattaaaaaaactaaggaaacatttttcttgtttcgagtagataatgccagcctgttaaacgccgtcgacgagtctaacggacaccaaccagcgaaccagcagcgtcgcgtcgggccaagcgaagcagacggcacggcatctctgtcgctgcctctggacccctctcgagagttccgctccaccgttggacttgctccgctgtcggcatccagaaattgcgtggcggagcggcagacgtgagccggcacggcaggcggcctcctcctcctctcacggcaccggcagctacgggggattcctttcccaccgctccttcgctttcccttcctcgcccgccgtaataaatagacaccccctccacaccctctttccccaacctcgtgttgttcggagcgcacacacacacaaccagatctcccccaaatccacccgtcggcacctccgcttcaaggtacgccgctcgtcctcccccccccccctctctaccttctctagatcggcgttccggtccatgcatggttagggcccggtagttctacttctgttcatgtttgtgttagatccgtgtttgtgttagatccgtgctgctagcgttcgtacacggatgcgacctgtacgtcagacacgttctgattgctaacttgccagtgtttctctttggggaatcctgggatggctctagccgttccgcagacgggatcgatttcatgattttttttgtttcgttgcatagggtttggtttgcccttttcctttatttcaatatatgccgtgcacttgtttgtcgggtcatcttttcatgcttttttttgtcttggttgtgatgatgtggtctggttgggcggtcgttctagatcggagtagaattctgtttcaaactacctggtggatttattaattttggatctgtatgtgtgtgccatacatattcatagttacgaattgaagatgatggatggaaatatcgatctaggataggtatacatgttgatgcgggttttactgatgcatatacagagatgctttttgttcgcttggttgtgatgatgtggtgtggttgggcggtcgttcattcgttctagatcggagtagaatactgtttcaaactacctggtgtatttattaattttggaactgtatgtgtgtgtcatacatcttcatagttacgagtttaagatggatggaaatatcgatctaggataggtatacatgttgatgtgggttttactgatgcatatacatgatggcatatgcagcatctattcatatgctctaaccttgagtacctatctattataataaacaagtatgttttataattattttgatcttgatatacttggatgatggcatatgcagcagctatatgtggatttttttagccctgccttcatacgctatttatttgcttggtactgtttcttttgtcgatgctcaccctgttgtttggtgttacttctgcaggtcgactctagaggatccatgaaacacattaatgactacttctgggccaaaaagaccgaggaaaatagtcgcctcctctggctccccctcacccagcacctcgaggacaccaaaaatattgccggcctcctctgggagcactggctcagcgaggtaagtttctgcttctacctttgatatatatataataattatcattaattagtagtaatataatatttcaaatatttttttcaaaataaaagaatgtagtatatagcaattgcttttctgtagtttataagtgtgtatattttaatttataacttttctaatatatgaccaaaacatggtgatgtgcagggccagaaggtattaattgagaacagcattaatgtcaaatcaaatatcgagaaccaaggcaagaggctcgcccagttcctcggcgccgtccacgacatcggcaaggccacccccgccttccagacccagaagggctacgccaacagcgtcgacctcgacatccagctcctcgagaagctcgagagggccggcttcagcggcatcagcagcctccagctcgcgagccccaagaagagccaccacagcatcgccggccagtacctcctcagccactacggcgtcgacgaggacatcgccaccatcatcggcggccaccacggcaggcccgtcgacgacctcgacggcctcaacagccagaagagctaccccagcaactactaccaggatgaaaagaaggacagcctcgtctaccagaagtggaagagcaatcaagaggccttcctcaactgggccctcaccgaaaccggcttcaacagcgtcagccagctccccaaaatcaaacagcccgcccaggtcatcctcagcggcctcctgatcatgagcgactggatcgccagcaacgagcacttcttccccctcctcagcctcgatgaaactgacgtcaagaacaagagccagcgcatcgaaaccggcttcaagaagtggaagaagagcaacctctggcagcccgaaaccttcgtcgacctcgtcaccctctaccaggagaggttcggcttcagcccgaggaacttccagctcatcctcagccagaccatcgaaaagaccaccaaccccggcatcgtcatcctcgaggccccgatgggcatcggcaagaccgaggccgccctcgccgtcagcgagcagctcagcagcaagaagggctgcagcggcctcttcttcggcctccccacccaggccaccagcaacggcatcttcaagcgcatcgagcagtggaccgagaatataaagggcaacaacagcgaccacttctcgatccagctcgtccacggcaaggccgccctcaacaccgactttatcgagctcctcaagggcaatacaattaatatggacgacagcgagaacggctcgatcttcgtcaacgagtggttcagcggcagaaagaccagcgcgctcgacgacttcgtcgtcggcaccgtcgaccagttcctgatggtcgccctcaagcagaagcacctcgccctccgccacctcggcttcagcaagaaggtgatcgtgatcgacgaggtccacgcctacgacgcctacatgagccagtacctcctcgaggccatcaggtggatgggcgcctacggcgtccccgtcatcatcctcagcgccaccctccccgcccagcagcgcgagaagctcataaaaagctacatggccggcatgggcgtcaagtggcgcgacatcgaaaatatagaccagataaaaatagacgcctaccccctcatcacctacaacgacggccccgacatccaccaggtcaagatgttcgagaagcaggagcagaaaaatatctacatccacaggctccccgaggagcagctcttcgacatcgtcaaggagggcctcgacaacggcggcgtcgtcggcatcatcgtcaacaccgtcaggaagagccaggagctcgcccgcaacttcagcgacatcttcggcgacgacatggtcgacctcctccacagcaacttcatcgccaccgagcgcatccgcaaggagaaggacctcctccaggagatcggcaagaaggccatccgcccccccaagaagattattatcggcacccaggtcctcgagcagagcctcgatatcgacttcgacgtcctgatcagcgacctcgcccctatggacctcctgatccagaggatcgggaggctacacaggcacaaaatcaaacgcccccagaagcacgaggtcgcccgcttctacgtcctcggcaccttcgaggagttcgacttcgacgagggcaccaggctcgtctacggcgactacctcctcgccaggacccagtacttcctccccgataaaatacgcctccccgacgacatcagccccctcgtccagaaggtctacaacagcgacctcaccatcaccttccccaagcccgagctccataaaaaatatctcgacgccaaaatagagcacgacgacaagattaaaaataaagaaaccaaggccaagagctacaggatcgccaaccccgtcctcaagaagagcagggtccgcaccaactccctcatcggctggctcaagaacctccaccccaacgacagcgaggagaaagcatatgcccaggtccgcgacatcgaggacaccgtcgaggtcatcgcattaaaaaaaataagcgacggctacggcctcttcatcgaaaataaagacatcagccagaacatcaccgaccccatcatcgccaagaaggtcgcccaaaatactctccgcctccccatgagcctcagcaaggcctacaacatcgaccagaccattaatgagctcgagagatataacaacagccacctcagccagtggcagaacagcagctggctcaagggcagcctcggcatcatcttcgataaaaacaacgagttcatcctcaacggcttcaagctcctctacgatgaaaaatatggcgtcaccatcgagaggctcgacaagaacgagagcgtcagccgcgccgaccccaagaagaagcgcaaggtctagttaacctagacttgtccatcttctggattggccaacttaattaatgtatgaaataaaaggatgcacacatagtgacatgctaatcactataatgtgggcatcaaagttgtgtgttatgtgtaattactagttatctgaataaaagagaaagagatcatccatatttcttatcctaaatgaatgtcacgtgtctttataattctttgatgaaccagatgcatttcattaaccaaatccatatacatataaatattaatcatatataattaatatcaattgggttagcaaaacaaatctagtctaggtgtgttttgcgaatgcggcc

SEQ ID NO: 100 - DNA, 5364 bp, Artificial
  UBI  cas3 with both N- and C-terminal NLSs
gtgcagcgtgacccggtcgtgcccctctctagagataatgagcattgcatgtctaagttataaaaaattaccacatattttttttgtcacacttgtttgaagtgcagtttatctatctttatacatatatttaaactttactctacgaataatataatctatagtactacaataatatcagtgttttagagaatcatataaatgaacagttagacatggtctaaaggacaattgagtattttgacaacaggactctacagttttatctttttagtgtgcatgtgttctcctttttttttgcaaatagcttcacctatataatacttcatccattttattagtacatccatttagggtttagggttaatggtttttatagactaatttttttagtacatctattttattctattttagcctctaaattaagaaaactaaaactctattttagtttttttatttaataatttagatataaaatagaataaaataaagtgactaaaaattaaacaaataccctttaagaaattaaaaaaactaaggaaacatttttcttgtttcgagtagataatgccagcctgttaaacgccgtcgacgagtctaacggacaccaaccagcgaaccagcagcgtcgcgtcgggccaagcgaagcagacggcacggcatctctgtcgctgcctctggacccctctcgagagttccgctccaccgttggacttgctccgctgtcggcatccagaaattgcgtggcggagcggcagacgtgagccggcacggcaggcggcctcctcctcctctcacggcaccggcagctacgggggattcctttcccaccgctccttcgctttcccttcctcgcccgccgtaataaatagacaccccctccacaccctctttccccaacctcgtgttgttcggagcgcacacacacacaaccagatctcccccaaatccacccgtcggcacctccgcttcaaggtacgccgctcgtcctcccccccccccctctctaccttctctagatcggcgttccggtccatgcatggttagggcccggtagttctacttctgttcatgtttgtgttagatccgtgtttgtgttagatccgtgctgctagcgttcgtacacggatgcgacctgtacgtcagacacgttctgattgctaacttgccagtgtttctctttggggaatcctgggatggctctagccgttccgcagacgggatcgatttcatgattttttttgtttcgttgcatagggtttggtttgcccttttcctttatttcaatatatgccgtgcacttgtttgtcgggtcatcttttcatgcttttttttgtcttggttgtgatgatgtggtctggttgggcggtcgttctagatcggagtagaattctgtttcaaactacctggtggatttattaattttggatctgtatgtgtgtgccatacatattcatagttacgaattgaagatgatggatggaaatatcgatctaggataggtatacatgttgatgcgggttttactgatgcatatacagagatgctttttgttcgcttggttgtgatgatgtggtgtggttgggcggtcgttcattcgttctagatcggagtagaatactgtttcaaactacctggtgtatttattaattttggaactgtatgtgtgtgtcatacatcttcatagttacgagtttaagatggatggaaatatcgatctaggataggtatacatgttgatgtgggttttactgatgcatatacatgatggcatatgcagcatctattcatatgctctaaccttgagtacctatctattataataaacaagtatgttttataattattttgatcttgatatacttggatgatggcatatgcagcagctatatgtggatttttttagccctgccttcatacgctatttatttgcttggtactgtttcttttgtcgatgctcaccctgttgtttggtgttacttctgcaggtcgactctagaggatccatggcccccaagaagaagcgcaaggtcatgaaacacattaatgactacttctgggccaaaaagaccgaggaaaatagtcgcctcctctggctccccctcacccagcacctcgaggacaccaaaaatattgccggcctcctctgggagcactggctcagcgaggtaagtttctgcttctacctttgatatatatataataattatcattaattagtagtaatataatatttcaaatatttttttcaaaataaaagaatgtagtatatagcaattgcttttctgtagtttataagtgtgtatattttaatttataacttttctaatatatgaccaaaacatggtgatgtgcagggccagaaggtattaattgagaacagcattaatgtcaaatcaaatatcgagaaccaaggcaagaggctcgcccagttcctcggcgccgtccacgacatcggcaaggccacccccgccttccagacccagaagggctacgccaacagcgtcgacctcgacatccagctcctcgagaagctcgagagggccggcttcagcggcatcagcagcctccagctcgcgagccccaagaagagccaccacagcatcgccggccagtacctcctcagccactacggcgtcgacgaggacatcgccaccatcatcggcggccaccacggcaggcccgtcgacgacctcgacggcctcaacagccagaagagctaccccagcaactactaccaggatgaaaagaaggacagcctcgtctaccagaagtggaagagcaatcaagaggccttcctcaactgggccctcaccgaaaccggcttcaacagcgtcagccagctccccaaaatcaaacagcccgcccaggtcatcctcagcggcctcctgatcatgagcgactggatcgccagcaacgagcacttcttccccctcctcagcctcgatgaaactgacgtcaagaacaagagccagcgcatcgaaaccggcttcaagaagtggaagaagagcaacctctggcagcccgaaaccttcgtcgacctcgtcaccctctaccaggagaggttcggcttcagcccgaggaacttccagctcatcctcagccagaccatcgaaaagaccaccaaccccggcatcgtcatcctcgaggccccgatgggcatcggcaagaccgaggccgccctcgccgtcagcgagcagctcagcagcaagaagggctgcagcggcctcttcttcggcctccccacccaggccaccagcaacggcatcttcaagcgcatcgagcagtggaccgagaatataaagggcaacaacagcgaccacttctcgatccagctcgtccacggcaaggccgccctcaacaccgactttatcgagctcctcaagggcaatacaattaatatggacgacagcgagaacggctcgatcttcgtcaacgagtggttcagcggcagaaagaccagcgcgctcgacgacttcgtcgtcggcaccgtcgaccagttcctgatggtcgccctcaagcagaagcacctcgccctccgccacctcggcttcagcaagaaggtgatcgtgatcgacgaggtccacgcctacgacgcctacatgagccagtacctcctcgaggccatcaggtggatgggcgcctacggcgtccccgtcatcatcctcagcgccaccctccccgcccagcagcgcgagaagctcataaaaagctacatggccggcatgggcgtcaagtggcgcgacatcgaaaatatagaccagataaaaatagacgcctaccccctcatcacctacaacgacggccccgacatccaccaggtcaagatgttcgagaagcaggagcagaaaaatatctacatccacaggctccccgaggagcagctcttcgacatcgtcaaggagggcctcgacaacggcggcgtcgtcggcatcatcgtcaacaccgtcaggaagagccaggagctcgcccgcaacttcagcgacatcttcggcgacgacatggtcgacctcctccacagcaacttcatcgccaccgagcgcatccgcaaggagaaggacctcctccaggagatcggcaagaaggccatccgcccccccaagaagattattatcggcacccaggtcctcgagcagagcctcgatatcgacttcgacgtcctgatcagcgacctcgcccctatggacctcctgatccagaggatcgggaggctacacaggcacaaaatcaaacgcccccagaagcacgaggtcgcccgcttctacgtcctcggcaccttcgaggagttcgacttcgacgagggcaccaggctcgtctacggcgactacctcctcgccaggacccagtacttcctccccgataaaatacgcctccccgacgacatcagccccctcgtccagaaggtctacaacagcgacctcaccatcaccttccccaagcccgagctccataaaaaatatctcgacgccaaaatagagcacgacgacaagattaaaaataaagaaaccaaggccaagagctacaggatcgccaaccccgtcctcaagaagagcagggtccgcaccaactccctcatcggctggctcaagaacctccaccccaacgacagcgaggagaaagcatatgcccaggtccgcgacatcgaggacaccgtcgaggtcatcgcattaaaaaaaataagcgacggctacggcctcttcatcgaaaataaagacatcagccagaacatcaccgaccccatcatcgccaagaaggtcgcccaaaatactctccgcctccccatgagcctcagcaaggcctacaacatcgaccagaccattaatgagctcgagagatataacaacagccacctcagccagtggcagaacagcagctggctcaagggcagcctcggcatcatcttcgataaaaacaacgagttcatcctcaacggcttcaagctcctctacgatgaaaaatatggcgtcaccatcgagaggctcgacaagaacgagagcgtcagccgcgccgaccccaagaagaagcgcaaggtctagttaacctagacttgtccatcttctggattggccaacttaattaatgtatgaaataaaaggatgcacacatagtgacatgctaatcactataatgtgggcatcaaagttgtgtgttatgtgtaattactagttatctgaataaaagagaaagagatcatccatatttcttatcctaaatgaatgtcacgtgtctttataattctttgatgaaccagatgcatttcattaaccaaatccatatacatataaatattaatcatatataattaatatcaattgggttagcaaaacaaatctagtctaggtgtgttttgcgaatgcggcc

SEQ ID NO: 101 - DNA, 5331 bp, Artificial
  UBI  cas3 nickase with N-terminal NLS
gtgcagcgtgacccggtcgtgcccctctctagagataatgagcattgcatgtctaagttataaaaaattaccacatattttttttgtcacacttgtttgaagtgcagtttatctatctttatacatatatttaaactttactctacgaataatataatctatagtactacaataatatcagtgttttagagaatcatataaatgaacagttagacatggtctaaaggacaattgagtattttgacaacaggactctacagttttatctttttagtgtgcatgtgttctcctttttttttgcaaatagcttcacctatataatacttcatccattttattagtacatccatttagggtttagggttaatggtttttatagactaatttttttagtacatctattttattctattttagcctctaaattaagaaaactaaaactctattttagtttttttatttaataatttagatataaaatagaataaaataaagtgactaaaaattaaacaaataccctttaagaaattaaaaaaactaaggaaacatttttcttgtttcgagtagataatgccagcctgttaaacgccgtcgacgagtctaacggacaccaaccagcgaaccagcagcgtcgcgtcgggccaagcgaagcagacggcacggcatctctgtcgctgcctctggacccctctcgagagttccgctccaccgttggacttgctccgctgtcggcatccagaaattgcgtggcggagcggcagacgtgagccggcacggcaggcggcctcctcctcctctcacggcaccggcagctacgggggattcctttcccaccgctccttcgctttcccttcctcgcccgccgtaataaatagacaccccctccacaccctctttccccaacctcgtgttgttcggagcgcacacacacacaaccagatctcccccaaatccacccgtcggcacctccgcttcaaggtacgccgctcgtcctcccccccccccctctctaccttctctagatcggcgttccggtccatgcatggttagggcccggtagttctacttctgttcatgtttgtgttagatccgtgtttgtgttagatccgtgctgctagcgttcgtacacggatgcgacctgtacgtcagacacgttctgattgctaacttgccagtgtttctctttggggaatcctgggatggctctagccgttccgcagacgggatcgatttcatgattttttttgtttcgttgcatagggtttggtttgcccttttcctttatttcaatatatgccgtgcacttgtttgtcgggtcatcttttcatgcttttttttgtcttggttgtgatgatgtggtctggttgggcggtcgttctagatcggagtagaattctgtttcaaactacctggtggatttattaattttggatctgtatgtgtgtgccatacatattcatagttacgaattgaagatgatggatggaaatatcgatctaggataggtatacatgttgatgcgggttttactgatgcatatacagagatgctttttgttcgcttggttgtgatgatgtggtgtggttgggcggtcgttcattcgttctagatcggagtagaatactgtttcaaactacctggtgtatttattaattttggaactgtatgtgtgtgtcatacatcttcatagttacgagtttaagatggatggaaatatcgatctaggataggtatacatgttgatgtgggttttactgatgcatatacatgatggcatatgcagcatctattcatatgctctaaccttgagtacctatctattataataaacaagtatgttttataattattttgatcttgatatacttggatgatggcatatgcagcagctatatgtggatttttttagccctgccttcatacgctatttatttgcttggtactgtttcttttgtcgatgctcaccctgttgtttggtgttacttctgcaggtcgactctagaggatccatggcccccaagaagaagcgcaaggtcatgaaacacattaatgactacttctgggccaaaaagaccgaggaaaatagtcgcctcctctggctccccctcacccagcacctcgaggacaccaaaaatattgccggcctcctctgggagcactggctcagcgaggtaagtttctgcttctacctttgatatatatataataattatcattaattagtagtaatataatatttcaaatatttttttcaaaataaaagaatgtagtatatagcaattgcttttctgtagtttataagtgtgtatattttaatttataacttttctaatatatgaccaaaacatggtgatgtgcagggccagaaggtattaattgagaacagcattaatgtcaaatcaaatatcgagaaccaaggcaagaggctcgcccagttcctcggcgccgtccacgacatcggcaaggccacccccgccttccagacccagaagggctacgccaacagcgtcgacctcgacatccagctcctcgagaagctcgagagggccggcttcagcggcatcagcagcctccagctcgcgagccccaagaagagccaccacagcatcgccggccagtacctcctcagccactacggcgtcgacgaggacatcgccaccatcatcggcggccaccacggcaggcccgtcgacgacctcgacggcctcaacagccagaagagctaccccagcaactactaccaggatgaaaagaaggacagcctcgtctaccagaagtggaagagcaatcaagaggccttcctcaactgggccctcaccgaaaccggcttcaacagcgtcagccagctccccaaaatcaaacagcccgcccaggtcatcctcagcggcctcctgatcatgagcgactggatcgccagcaacgagcacttcttccccctcctcagcctcgatgaaactgacgtcaagaacaagagccagcgcatcgaaaccggcttcaagaagtggaagaagagcaacctctggcagcccgaaaccttcgtcgacctcgtcaccctctaccaggagaggttcggcttcagcccgaggaacttccagctcatcctcagccagaccatcgaaaagaccaccaaccccggcatcgtcatcctcgaggccccgatgggcatcggcaagaccgaggccgccctcgccgtcagcgagcagctcagcagcaagaagggctgcagcggcctcttcttcggcctccccacccaggccaccagcaacggcatcttcaagcgcatcgagcagtggaccgagaatataaagggcaacaacagcgaccacttctcgatccagctcgtccacggcaaggccgccctcaacaccgactttatcgagctcctcaagggcaatacaattaatatggacgacagcgagaacggctcgatcttcgtcaacgagtggttcagcggcagaaagaccagcgcgctcgacgacttcgtcgtcggcaccgtcgaccagttcctgatggtcgccctcaagcagaagcacctcgccctccgccacctcggcttcagcaagaaggtgatcgtgatcgccgaggtccacgcctacgacgcctacatgagccagtacctcctcgaggccatcaggtggatgggcgcctacggcgtccccgtcatcatcctcagcgccaccctccccgcccagcagcgcgagaagctcataaaaagctacatggccggcatgggcgtcaagtggcgcgacatcgaaaatatagaccagataaaaatagacgcctaccccctcatcacctacaacgacggccccgacatccaccaggtcaagatgttcgagaagcaggagcagaaaaatatctacatccacaggctccccgaggagcagctcttcgacatcgtcaaggagggcctcgacaacggcggcgtcgtcggcatcatcgtcaacaccgtcaggaagagccaggagctcgcccgcaacttcagcgacatcttcggcgacgacatggtcgacctcctccacagcaacttcatcgccaccgagcgcatccgcaaggagaaggacctcctccaggagatcggcaagaaggccatccgcccccccaagaagattattatcggcacccaggtcctcgagcagagcctcgatatcgacttcgacgtcctgatcagcgacctcgcccctatggacctcctgatccagaggatcgggaggctacacaggcacaaaatcaaacgcccccagaagcacgaggtcgcccgcttctacgtcctcggcaccttcgaggagttcgacttcgacgagggcaccaggctcgtctacggcgactacctcctcgccaggacccagtacttcctccccgataaaatacgcctccccgacgacatcagccccctcgtccagaaggtctacaacagcgacctcaccatcaccttccccaagcccgagctccataaaaaatatctcgacgccaaaatagagcacgacgacaagattaaaaataaagaaaccaaggccaagagctacaggatcgccaaccccgtcctcaagaagagcagggtccgcaccaactccctcatcggctggctcaagaacctccaccccaacgacagcgaggagaaagcatatgcccaggtccgcgacatcgaggacaccgtcgaggtcatcgcattaaaaaaaataagcgacggctacggcctcttcatcgaaaataaagacatcagccagaacatcaccgaccccatcatcgccaagaaggtcgcccaaaatactctccgcctccccatgagcctcagcaaggcctacaacatcgaccagaccattaatgagctcgagagatataacaacagccacctcagccagtggcagaacagcagctggctcaagggcagcctcggcatcatcttcgataaaaacaacgagttcatcctcaacggcttcaagctcctctacgatgaaaaatatggcgtcaccatcgagaggctcgacaagaacgagagcgtctagttaacctagacttgtccatcttctggattggccaacttaattaatgtatgaaataaaaggatgcacacatagtgacatgctaatcactataatgtgggcatcaaagttgtgtgttatgtgtaattactagttatctgaataaaagagaaagagatcatccatatttcttatcctaaatgaatgtcacgtgtctttataattctttgatgaaccagatgcatttcattaaccaaatccatatacatataaatattaatcatatataattaatatcaattgggttagcaaaacaaatctagtctaggtgtgttttgcgaatgcggcc

SEQ ID NO: 102 - DNA, 5337 bp, Artificial
  UBI  cas3 nickase with C-terminal NLS
gtgcagcgtgacccggtcgtgcccctctctagagataatgagcattgcatgtctaagttataaaaaattaccacatattttttttgtcacacttgtttgaagtgcagtttatctatctttatacatatatttaaactttactctacgaataatataatctatagtactacaataatatcagtgttttagagaatcatataaatgaacagttagacatggtctaaaggacaattgagtattttgacaacaggactctacagttttatctttttagtgtgcatgtgttctcctttttttttgcaaatagcttcacctatataatacttcatccattttattagtacatccatttagggtttagggttaatggtttttatagactaatttttttagtacatctattttattctattttagcctctaaattaagaaaactaaaactctattttagtttttttatttaataatttagatataaaatagaataaaataaagtgactaaaaattaaacaaataccctttaagaaattaaaaaaactaaggaaacatttttcttgtttcgagtagataatgccagcctgttaaacgccgtcgacgagtctaacggacaccaaccagcgaaccagcagcgtcgcgtcgggccaagcgaagcagacggcacggcatctctgtcgctgcctctggacccctctcgagagttccgctccaccgttggacttgctccgctgtcggcatccagaaattgcgtggcggagcggcagacgtgagccggcacggcaggcggcctcctcctcctctcacggcaccggcagctacgggggattcctttcccaccgctccttcgctttcccttcctcgcccgccgtaataaatagacaccccctccacaccctctttccccaacctcgtgttgttcggagcgcacacacacacaaccagatctcccccaaatccacccgtcggcacctccgcttcaaggtacgccgctcgtcctcccccccccccctctctaccttctctagatcggcgttccggtccatgcatggttagggcccggtagttctacttctgttcatgtttgtgttagatccgtgtttgtgttagatccgtgctgctagcgttcgtacacggatgcgacctgtacgtcagacacgttctgattgctaacttgccagtgtttctctttggggaatcctgggatggctctagccgttccgcagacgggatcgatttcatgattttttttgtttcgttgcatagggtttggtttgcccttttcctttatttcaatatatgccgtgcacttgtttgtcgggtcatcttttcatgcttttttttgtcttggttgtgatgatgtggtctggttgggcggtcgttctagatcggagtagaattctgtttcaaactacctggtggatttattaattttggatctgtatgtgtgtgccatacatattcatagttacgaattgaagatgatggatggaaatatcgatctaggataggtatacatgttgatgcgggttttactgatgcatatacagagatgctttttgttcgcttggttgtgatgatgtggtgtggttgggcggtcgttcattcgttctagatcggagtagaatactgtttcaaactacctggtgtatttattaattttggaactgtatgtgtgtgtcatacatcttcatagttacgagtttaagatggatggaaatatcgatctaggataggtatacatgttgatgtgggttttactgatgcatatacatgatggcatatgcagcatctattcatatgctctaaccttgagtacctatctattataataaacaagtatgttttataattattttgatcttgatatacttggatgatggcatatgcagcagctatatgtggatttttttagccctgccttcatacgctatttatttgcttggtactgtttcttttgtcgatgctcaccctgttgtttggtgttacttctgcaggtcgactctagaggatccatgaaacacattaatgactacttctgggccaaaaagaccgaggaaaatagtcgcctcctctggctccccctcacccagcacctcgaggacaccaaaaatattgccggcctcctctgggagcactggctcagcgaggtaagtttctgcttctacctttgatatatatataataattatcattaattagtagtaatataatatttcaaatatttttttcaaaataaaagaatgtagtatatagcaattgcttttctgtagtttataagtgtgtatattttaatttataacttttctaatatatgaccaaaacatggtgatgtgcagggccagaaggtattaattgagaacagcattaatgtcaaatcaaatatcgagaaccaaggcaagaggctcgcccagttcctcggcgccgtccacgacatcggcaaggccacccccgccttccagacccagaagggctacgccaacagcgtcgacctcgacatccagctcctcgagaagctcgagagggccggcttcagcggcatcagcagcctccagctcgcgagccccaagaagagccaccacagcatcgccggccagtacctcctcagccactacggcgtcgacgaggacatcgccaccatcatcggcggccaccacggcaggcccgtcgacgacctcgacggcctcaacagccagaagagctaccccagcaactactaccaggatgaaaagaaggacagcctcgtctaccagaagtggaagagcaatcaagaggccttcctcaactgggccctcaccgaaaccggcttcaacagcgtcagccagctccccaaaatcaaacagcccgcccaggtcatcctcagcggcctcctgatcatgagcgactggatcgccagcaacgagcacttcttccccctcctcagcctcgatgaaactgacgtcaagaacaagagccagcgcatcgaaaccggcttcaagaagtggaagaagagcaacctctggcagcccgaaaccttcgtcgacctcgtcaccctctaccaggagaggttcggcttcagcccgaggaacttccagctcatcctcagccagaccatcgaaaagaccaccaaccccggcatcgtcatcctcgaggccccgatgggcatcggcaagaccgaggccgccctcgccgtcagcgagcagctcagcagcaagaagggctgcagcggcctcttcttcggcctccccacccaggccaccagcaacggcatcttcaagcgcatcgagcagtggaccgagaatataaagggcaacaacagcgaccacttctcgatccagctcgtccacggcaaggccgccctcaacaccgactttatcgagctcctcaagggcaatacaattaatatggacgacagcgagaacggctcgatcttcgtcaacgagtggttcagcggcagaaagaccagcgcgctcgacgacttcgtcgtcggcaccgtcgaccagttcctgatggtcgccctcaagcagaagcacctcgccctccgccacctcggcttcagcaagaaggtgatcgtgatcgccgaggtccacgcctacgacgcctacatgagccagtacctcctcgaggccatcaggtggatgggcgcctacggcgtccccgtcatcatcctcagcgccaccctccccgcccagcagcgcgagaagctcataaaaagctacatggccggcatgggcgtcaagtggcgcgacatcgaaaatatagaccagataaaaatagacgcctaccccctcatcacctacaacgacggccccgacatccaccaggtcaagatgttcgagaagcaggagcagaaaaatatctacatccacaggctccccgaggagcagctcttcgacatcgtcaaggagggcctcgacaacggcggcgtcgtcggcatcatcgtcaacaccgtcaggaagagccaggagctcgcccgcaacttcagcgacatcttcggcgacgacatggtcgacctcctccacagcaacttcatcgccaccgagcgcatccgcaaggagaaggacctcctccaggagatcggcaagaaggccatccgcccccccaagaagattattatcggcacccaggtcctcgagcagagcctcgatatcgacttcgacgtcctgatcagcgacctcgcccctatggacctcctgatccagaggatcgggaggctacacaggcacaaaatcaaacgcccccagaagcacgaggtcgcccgcttctacgtcctcggcaccttcgaggagttcgacttcgacgagggcaccaggctcgtctacggcgactacctcctcgccaggacccagtacttcctccccgataaaatacgcctccccgacgacatcagccccctcgtccagaaggtctacaacagcgacctcaccatcaccttccccaagcccgagctccataaaaaatatctcgacgccaaaatagagcacgacgacaagattaaaaataaagaaaccaaggccaagagctacaggatcgccaaccccgtcctcaagaagagcagggtccgcaccaactccctcatcggctggctcaagaacctccaccccaacgacagcgaggagaaagcatatgcccaggtccgcgacatcgaggacaccgtcgaggtcatcgcattaaaaaaaataagcgacggctacggcctcttcatcgaaaataaagacatcagccagaacatcaccgaccccatcatcgccaagaaggtcgcccaaaatactctccgcctccccatgagcctcagcaaggcctacaacatcgaccagaccattaatgagctcgagagatataacaacagccacctcagccagtggcagaacagcagctggctcaagggcagcctcggcatcatcttcgataaaaacaacgagttcatcctcaacggcttcaagctcctctacgatgaaaaatatggcgtcaccatcgagaggctcgacaagaacgagagcgtcagccgcgccgaccccaagaagaagcgcaaggtctagttaacctagacttgtccatcttctggattggccaacttaattaatgtatgaaataaaaggatgcacacatagtgacatgctaatcactataatgtgggcatcaaagttgtgtgttatgtgtaattactagttatctgaataaaagagaaagagatcatccatatttcttatcctaaatgaatgtcacgtgtctttataattctttgatgaaccagatgcatttcattaaccaaatccatatacatataaatattaatcatatataattaatatcaattgggttagcaaaacaaatctagtctaggtgtgttttgcgaatgcggcc

SEQ ID NO: 103 - DNA, 5364 bp, Artificial
  UBI  cas3 nickase with both N- and C-terminal NLSs
gtgcagcgtgacccggtcgtgcccctctctagagataatgagcattgcatgtctaagttataaaaaattaccacatattttttttgtcacacttgtttgaagtgcagtttatctatctttatacatatatttaaactttactctacgaataatataatctatagtactacaataatatcagtgttttagagaatcatataaatgaacagttagacatggtctaaaggacaattgagtattttgacaacaggactctacagttttatctttttagtgtgcatgtgttctcctttttttttgcaaatagcttcacctatataatacttcatccattttattagtacatccatttagggtttagggttaatggtttttatagactaatttttttagtacatctattttattctattttagcctctaaattaagaaaactaaaactctattttagtttttttatttaataatttagatataaaatagaataaaataaagtgactaaaaattaaacaaataccctttaagaaattaaaaaaactaaggaaacatttttcttgtttcgagtagataatgccagcctgttaaacgccgtcgacgagtctaacggacaccaaccagcgaaccagcagcgtcgcgtcgggccaagcgaagcagacggcacggcatctctgtcgctgcctctggacccctctcgagagttccgctccaccgttggacttgctccgctgtcggcatccagaaattgcgtggcggagcggcagacgtgagccggcacggcaggcggcctcctcctcctctcacggcaccggcagctacgggggattcctttcccaccgctccttcgctttcccttcctcgcccgccgtaataaatagacaccccctccacaccctctttccccaacctcgtgttgttcggagcgcacacacacacaaccagatctcccccaaatccacccgtcggcacctccgcttcaaggtacgccgctcgtcctcccccccccccctctctaccttctctagatcggcgttccggtccatgcatggttagggcccggtagttctacttctgttcatgtttgtgttagatccgtgtttgtgttagatccgtgctgctagcgttcgtacacggatgcgacctgtacgtcagacacgttctgattgctaacttgccagtgtttctctttggggaatcctgggatggctctagccgttccgcagacgggatcgatttcatgattttttttgtttcgttgcatagggtttggtttgcccttttcctttatttcaatatatgccgtgcacttgtttgtcgggtcatcttttcatgcttttttttgtcttggttgtgatgatgtggtctggttgggcggtcgttctagatcggagtagaattctgtttcaaactacctggtggatttattaattttggatctgtatgtgtgtgccatacatattcatagttacgaattgaagatgatggatggaaatatcgatctaggataggtatacatgttgatgcgggttttactgatgcatatacagagatgctttttgttcgcttggttgtgatgatgtggtgtggttgggcggtcgttcattcgttctagatcggagtagaatactgtttcaaactacctggtgtatttattaattttggaactgtatgtgtgtgtcatacatcttcatagttacgagtttaagatggatggaaatatcgatctaggataggtatacatgttgatgtgggttttactgatgcatatacatgatggcatatgcagcatctattcatatgctctaaccttgagtacctatctattataataaacaagtatgttttataattattttgatcttgatatacttggatgatggcatatgcagcagctatatgtggatttttttagccctgccttcatacgctatttatttgcttggtactgtttcttttgtcgatgctcaccctgttgtttggtgttacttctgcaggtcgactctagaggatccatggcccccaagaagaagcgcaaggtcatgaaacacattaatgactacttctgggccaaaaagaccgaggaaaatagtcgcctcctctggctccccctcacccagcacctcgaggacaccaaaaatattgccggcctcctctgggagcactggctcagcgaggtaagtttctgcttctacctttgatatatatataataattatcattaattagtagtaatataatatttcaaatatttttttcaaaataaaagaatgtagtatatagcaattgcttttctgtagtttataagtgtgtatattttaatttataacttttctaatatatgaccaaaacatggtgatgtgcagggccagaaggtattaattgagaacagcattaatgtcaaatcaaatatcgagaaccaaggcaagaggctcgcccagttcctcggcgccgtccacgacatcggcaaggccacccccgccttccagacccagaagggctacgccaacagcgtcgacctcgacatccagctcctcgagaagctcgagagggccggcttcagcggcatcagcagcctccagctcgcgagccccaagaagagccaccacagcatcgccggccagtacctcctcagccactacggcgtcgacgaggacatcgccaccatcatcggcggccaccacggcaggcccgtcgacgacctcgacggcctcaacagccagaagagctaccccagcaactactaccaggatgaaaagaaggacagcctcgtctaccagaagtggaagagcaatcaagaggccttcctcaactgggccctcaccgaaaccggcttcaacagcgtcagccagctccccaaaatcaaacagcccgcccaggtcatcctcagcggcctcctgatcatgagcgactggatcgccagcaacgagcacttcttccccctcctcagcctcgatgaaactgacgtcaagaacaagagccagcgcatcgaaaccggcttcaagaagtggaagaagagcaacctctggcagcccgaaaccttcgtcgacctcgtcaccctctaccaggagaggttcggcttcagcccgaggaacttccagctcatcctcagccagaccatcgaaaagaccaccaaccccggcatcgtcatcctcgaggccccgatgggcatcggcaagaccgaggccgccctcgccgtcagcgagcagctcagcagcaagaagggctgcagcggcctcttcttcggcctccccacccaggccaccagcaacggcatcttcaagcgcatcgagcagtggaccgagaatataaagggcaacaacagcgaccacttctcgatccagctcgtccacggcaaggccgccctcaacaccgactttatcgagctcctcaagggcaatacaattaatatggacgacagcgagaacggctcgatcttcgtcaacgagtggttcagcggcagaaagaccagcgcgctcgacgacttcgtcgtcggcaccgtcgaccagttcctgatggtcgccctcaagcagaagcacctcgccctccgccacctcggcttcagcaagaaggtgatcgtgatcgccgaggtccacgcctacgacgcctacatgagccagtacctcctcgaggccatcaggtggatgggcgcctacggcgtccccgtcatcatcctcagcgccaccctccccgcccagcagcgcgagaagctcataaaaagctacatggccggcatgggcgtcaagtggcgcgacatcgaaaatatagaccagataaaaatagacgcctaccccctcatcacctacaacgacggccccgacatccaccaggtcaagatgttcgagaagcaggagcagaaaaatatctacatccacaggctccccgaggagcagctcttcgacatcgtcaaggagggcctcgacaacggcggcgtcgtcggcatcatcgtcaacaccgtcaggaagagccaggagctcgcccgcaacttcagcgacatcttcggcgacgacatggtcgacctcctccacagcaacttcatcgccaccgagcgcatccgcaaggagaaggacctcctccaggagatcggcaagaaggccatccgcccccccaagaagattattatcggcacccaggtcctcgagcagagcctcgatatcgacttcgacgtcctgatcagcgacctcgcccctatggacctcctgatccagaggatcgggaggctacacaggcacaaaatcaaacgcccccagaagcacgaggtcgcccgcttctacgtcctcggcaccttcgaggagttcgacttcgacgagggcaccaggctcgtctacggcgactacctcctcgccaggacccagtacttcctccccgataaaatacgcctccccgacgacatcagccccctcgtccagaaggtctacaacagcgacctcaccatcaccttccccaagcccgagctccataaaaaatatctcgacgccaaaatagagcacgacgacaagattaaaaataaagaaaccaaggccaagagctacaggatcgccaaccccgtcctcaagaagagcagggtccgcaccaactccctcatcggctggctcaagaacctccaccccaacgacagcgaggagaaagcatatgcccaggtccgcgacatcgaggacaccgtcgaggtcatcgcattaaaaaaaataagcgacggctacggcctcttcatcgaaaataaagacatcagccagaacatcaccgaccccatcatcgccaagaaggtcgcccaaaatactctccgcctccccatgagcctcagcaaggcctacaacatcgaccagaccattaatgagctcgagagatataacaacagccacctcagccagtggcagaacagcagctggctcaagggcagcctcggcatcatcttcgataaaaacaacgagttcatcctcaacggcttcaagctcctctacgatgaaaaatatggcgtcaccatcgagaggctcgacaagaacgagagcgtcagccgcgccgaccccaagaagaagcgcaaggtctagttaacctagacttgtccatcttctggattggccaacttaattaatgtatgaaataaaaggatgcacacatagtgacatgctaatcactataatgtgggcatcaaagttgtgtgttatgtgtaattactagttatctgaataaaagagaaagagatcatccatatttcttatcctaaatgaatgtcacgtgtctttataattctttgatgaaccagatgcatttcattaaccaaatccatatacatataaatattaatcatatataattaatatcaattgggttagcaaaacaaatctagtctaggtgtgttttgcgaatgcggcc

SEQ ID NO: 104 - DNA, 455 bp, Artificial
  Upstream binding region for Type I-E Cascade guide RNA complexes
tacaggtcactaataccatctaagtagttggttcatagtgactgcatatgttgtgttttacagtattatgtagtctgttttttatgcaaaatctaatttaatatattgatatttatatcattttacgtttctcgttcaactttcttgtacaaagtggcatcggccagaatggcccggaccgggttaccgcggccgcgaattctgtacaaccggtctaactaactagcaattcgcccttgatactgtatatactcacagtatcatatgatactgtatatactcacagtatcatatgatactgtatatactcacagtataagggcgaattggcccttgatactgtatatactcacagtatcatatgatactgtatatactcacagtatcatatgatactgtatatactcacagtataagggcgaattgctgcagcccgggacaatcccactatcctt

SEQ ID NO: 105 - DNA, 49 bp, Cauliflower Mosaic Virus
cgcaagacccttcctctatataaggaagttcatttcatttggagaggac

SEQ ID NO: 106 - DNA, 67 bp, Tobacco Mosaic Virus
tatttttacaacaattaccaacaacaacaaacaacaaacaacattacaattactatttacaattaca

SEQ ID NO: 107 - DNA, 678 bp, Artificial
  Gene encoding Ds-Red Express fluorescent protein
atggcctcctccgaggacgtcatcaaggagttcatgcgcttcaaggtgcgcatggagggctccgtgaacggccacgagttcgagatcgagggcgagggcgagggccgcccctacgagggcacccagaccgccaagctgaaggtgaccaagggcggccccctgcccttcgcctgggacatcctgtccccccagttccagtacggctccaaggtgtacgtgaagcaccccgccgacatccccgactacaagaagctgtccttccccgagggcttcaagtgggagcgcgtgatgaacttcgaggacggcggcgtggtgaccgtgacccaggactcctccctgcaggacggctccttcatctacaaggtgaagttcatcggcgtgaacttcccctccgacggccccgtaatgcagaagaagactatgggctgggaggcctccaccgagcgcctgtacccccgcgacggcgtgctgaagggcgagatccacaaggccctgaagctgaaggacggcggccactacctggtggagttcaagtccatctacatggccaagaagcccgtgcagctgcccggctactactacgtggactccaagctggacatcacctcccacaacgaggactacaccatcgtggagcagtacgagcgcgccgagggccgccaccacctgttcctgtag

SEQ ID NO: 108 - DNA, 950 bp, Oryza sativa
agctgctgctgttctagggttcacaagtctgcctatttgtcttccccaatggagctatggttgtctggtctggtccttggtcgtgtcccgtttcattgtgtactatttacctgtaatgtgtatccttaagtctggtttgatggtgtctgaaacgttttgctgtggtagagcagcatggaagaactataatgaataagtgatccctaatcattgtgtccaaattttgcttctgctatacccttttgtgctgtttcttatgttttgcttaaaaatttgatctgacaaacaaatttgtctaaattatgctcttgttctgactgtgtactgtacacatttgtattgctaccggtttggcacatagttttctctttgattgcagatcaaacccttctgattgcagattgcttggctatggctgatgtgctcactgttcttctttagcttgtatattgctgatggtggcttggctacggctgaaaaagttgctgctgcgccgacttggcaactgttgctccagtaatgctttgtcctctcttcctagccgccgacttggcacttggcagctgttgctcctgtaatgcgttgttatctcttatctcttgagatgtactatgattttgaggctgtttgacttgtgccagattgccagtgctgatgctatattatctcaggtttttatgctagtatatgttttactgtgtgctgcctgtgtcgagttacgtaatctattgaaccgctatgcgtgttgatgccctgttgttgcttgccagattgatgcccctgttgcttgcagcttgcaagctgtagtgaaatcctaaaattccaaaccaaatctattctgaacttttgaagatctgtgatgtccggaagaaaagattcaaacagataaacgggactctccagaatctataaaataaatgatcgacaaacgctttgctttggtaggcttc

SEQ ID NO: 109 - DNA, 2220 bp, Artificial
  GACT expression cassette
tacaggtcactaataccatctaagtagttggttcatagtgactgcatatgttgtgttttacagtattatgtagtctgttttttatgcaaaatctaatttaatatattgatatttatatcattttacgtttctcgttcaactttcttgtacaaagtggcatcggccagaatggcccggaccgggttaccgcggccgcgaattctgtacaaccggtctaactaactagcaattcgcccttgatactgtatatactcacagtatcatatgatactgtatatactcacagtatcatatgatactgtatatactcacagtataagggcgaattggcccttgatactgtatatactcacagtatcatatgatactgtatatactcacagtatcatatgatactgtatatactcacagtataagggcgaattgctgcagcccgggacaatcccactatccttcgcaagacccttcctctatataaggaagttcatttcatttggagaggactatttttacaacaattaccaacaacaacaaacaacaaacaacattacaattactatttacaattacaccatggcctcctccgaggacgtcatcaaggagttcatgcgcttcaaggtgcgcatggagggctccgtgaacggccacgagttcgagatcgagggcgagggcgagggccgcccctacgagggcacccagaccgccaagctgaaggtgaccaagggcggccccctgcccttcgcctgggacatcctgtccccccagttccagtacggctccaaggtgtacgtgaagcaccccgccgacatccccgactacaagaagctgtccttccccgagggcttcaagtgggagcgcgtgatgaacttcgaggacggcggcgtggtgaccgtgacccaggactcctccctgcaggacggctccttcatctacaaggtgaagttcatcggcgtgaacttcccctccgacggccccgtaatgcagaagaagactatgggctgggaggcctccaccgagcgcctgtacccccgcgacggcgtgctgaagggcgagatccacaaggccctgaagctgaaggacggcggccactacctggtggagttcaagtccatctacatggccaagaagcccgtgcagctgcccggctactactacgtggactccaagctggacatcacctcccacaacgaggactacaccatcgtggagcagtacgagcgcgccgagggccgccaccacctgttcctgtaggtcaactacccacggtaccagctgctgctgttctagggttcacaagtctgcctatttgtcttccccaatggagctatggttgtctggtctggtccttggtcgtgtcccgtttcattgtgtactatttacctgtaatgtgtatccttaagtctggtttgatggtgtctgaaacgttttgctgtggtagagcagcatggaagaactataatgaataagtgatccctaatcattgtgtccaaattttgcttctgctatacccttttgtgctgtttcttatgttttgcttaaaaatttgatctgacaaacaaatttgtctaaattatgctcttgttctgactgtgtactgtacacatttgtattgctaccggtttggcacatagttttctctttgattgcagatcaaacccttctgattgcagattgcttggctatggctgatgtgctcactgttcttctttagcttgtatattgctgatggtggcttggctacggctgaaaaagttgctgctgcgccgacttggcaactgttgctccagtaatgctttgtcctctcttcctagccgccgacttggcacttggcagctgttgctcctgtaatgcgttgttatctcttatctcttgagatgtactatgattttgaggctgtttgacttgtgccagattgccagtgctgatgctatattatctcaggtttttatgctagtatatgttttactgtgtgctgcctgtgtcgagttacgtaatctattgaaccgctatgcgtgttgatgccctgttgttgcttgccagattgatgcccctgttgcttgcagcttgcaagctgtagtgaaatcctaaaattccaaaccaaatctattctgaacttttgaagatctgtgatgtccggaagaaaagattcaaacagataaacgggactctccagaatctataaaataaatgatcgacaaacgctttgctttggtaggcttc

SEQ ID NO: 110 - DNA, 975 bp, Artificial
  cas6 gene with C-terminal linkage to AtCBF1 motif
atgtacatcagcagggtcgagatcgaccgatataataggcgcaaggtcagggacctcacccacgtcggcgcctaccacgcctgggtcgaggagagcttccccagcgagctcgagcaatcaatcaggaccaggaagctctggcgcatcgaccgcatccagggcaaggactacctcatcatcgtcagcaaggagaagcccaacctccagaagctcgaaaaatatggcgtcgtcggcagcgcccagaccaaggactaccagcacttcctcgacagcatcaagaccggcttcaggatgaacttcaggatcgtcctcaaccccgtcatcagcatcaccagccccgacaaatcaaaacgcggcgtcgtcaagccccacgtcaccattaaacaccagatggacttcctcgtcaagcagagcgaaaaaaacggcttcagcctcgtcggcgagagcttctccatcgtcgagaggggctacgaggtgttccagaagcccgagaagcccatcaggctcagcaaggtcgtctacgagggcaccctcaccgtcagcgacgacacgctcttcaagaagatgctcaccgagggcgtcggcaagaagaaagcatatggcttcggcctcatgaccgtcgtccccctcgaggagagcagggccgaccccaagaagaagaggaaggtgggtcgggcgacatgtgccaaggacatccagaaggccgctgccgaagcggcgctcgcttttcaggacgaaacctgcgacaccaccaccaccaaccacggcctcgacatggaggaaacaatggtggaggccatctacacgcctgaacagagcgagggggctttctacatggacgaggaaaccatgttcggcatgcccacactcctcgacaacatggccgagggcatgctcctcccccccccgagcgtccagtggaaccacaactacgacggcgaaggcgacggcgacgtcagcctctggtcctactag

SEQ ID NO: 111 - DNA, 2004 bp, Artificial
  cse1 gene with C-terminal linkage to AtCBF1 motif
atgagccgcttcaacctcctcgacgagccctggatcagcgtcatctacgacgagaagggcagcaccaaggacgtcagcctccaggacctcttcaccaacgcccaccagtacaaggagctcgccggcgacaccaagacccaggacttcgccgtcctcagggtcctcctcgccgtcctccacaccgtgttcagccgcttcgacatcgacggcaacgcctacgagtacctcaccatcgacgagggctggaaccagctcgagcccgtcgacgagatggacatcgagaactacgaggaggccctctatgaaacatgggagaagctctggaccaataaaagattccccaacatcgtcaatcaatacctcgagaagtggagggaccgcttctacctcttcgaccagaagtaccccttcttccaggtcaccaaggaggacatcgccggcgataaaattagcaaggccaagggcaccagcatcctcggcaaaaatataaatcgcatcatcagcgagagcggcaacaagatcgccctcttcagccccaaggacgaggaaaataaaaatactctcaccgccgccgagctcgccaggtggctcatcaccttccagggctacagcggcgtcagcgacaaggtcatcttcggcaatgaaaaatatacccccagcaagggctggctcttcgacatcggcgccatctacattaaaggcaacaccctcttcgaaaccctcctcctcaactacatcagcccctacaacgagtgcggcaatgtggaaaatatacagaggccctgctgggagaggaagagcagcgacatcattaaaagctacctcgatgaaaaagacatcaccaacatcgccagcctctacaccgtctggagcaagggcatctacatcgaccccgacttcaacctcaataaacccttcagcttcgacatcgtcaagctccccgacatcaaccaccgcgacaacttcctcgagcccatgaccctctggaagtacaacgtcagcggcaaaaatagggacagctacacccccaagaagcacctcctcaaccagagcctctggaggagcttcggcctcctgagcataaaagacaccgacctccagcacaggaagcccggcgtcatcgagtggctcacctacatcgacgatataataggcaacaggctcagcaacatcgtcgccatcagcatgcaggacgacggcaacccccagagcaggctgcccaccgacgaggtcatcgacagcatcttcatcaacgacctcgtcctcaccgacctcgacgagggcggctgggtccccaggatcaacgaggtcgtcgaggaaaccaagaagatcatcagcaggacatataaaacgtacattaatgatataaaggagatccgcaacatcagcaacggcagctacacccagcagatcgtcgagagcctctacttcaagatcgaccagcccttcaggcagtggctcgccagcatccagcccgaggacgacaaggacagcaagatccaggagtggcgcgtcctcctcaagaaaatagtcaaggccgaggccgaggtcatcctccaccagggcggcgccagggactacctcggcatccagaaggacggccgaattaagaacatcgccaccgcctacaacagcttcgacttctggctccgccagcagttaaaaagcagggccgaccccaagaagaagaggaaggtgggtcgggcgacatgtgccaaggacatccagaaggccgctgccgaagcggcgctcgcttttcaggacgaaacctgcgacaccaccaccaccaaccacggcctcgacatggaggaaacaatggtggaggccatctacacgcctgaacagagcgagggggctttctacatggacgaggaaaccatgttcggcatgcccacactcctcgacaacatggccgagggcatgctcctcccccccccgagcgtccagtggaaccacaactacgacggcgaaggcgacggcgacgtcagcctctggtcctactag

SEQ ID NO: 112 - DNA, 3309 bp, Artificial
  UBI  cas6 gene with C-terminal linkage to AtCBF1 motif
gtgcagcgtgacccggtcgtgcccctctctagagataatgagcattgcatgtctaagttataaaaaattaccacatattttttttgtcacacttgtttgaagtgcagtttatctatctttatacatatatttaaactttactctacgaataatataatctatagtactacaataatatcagtgttttagagaatcatataaatgaacagttagacatggtctaaaggacaattgagtattttgacaacaggactctacagttttatctttttagtgtgcatgtgttctcctttttttttgcaaatagcttcacctatataatacttcatccattttattagtacatccatttagggtttagggttaatggtttttatagactaatttttttagtacatctattttattctattttagcctctaaattaagaaaactaaaactctattttagtttttttatttaataatttagatataaaatagaataaaataaagtgactaaaaattaaacaaataccctttaagaaattaaaaaaactaaggaaacatttttcttgtttcgagtagataatgccagcctgttaaacgccgtcgacgagtctaacggacaccaaccagcgaaccagcagcgtcgcgtcgggccaagcgaagcagacggcacggcatctctgtcgctgcctctggacccctctcgagagttccgctccaccgttggacttgctccgctgtcggcatccagaaattgcgtggcggagcggcagacgtgagccggcacggcaggcggcctcctcctcctctcacggcaccggcagctacgggggattcctttcccaccgctccttcgctttcccttcctcgcccgccgtaataaatagacaccccctccacaccctctttccccaacctcgtgttgttcggagcgcacacacacacaaccagatctcccccaaatccacccgtcggcacctccgcttcaaggtacgccgctcgtcctcccccccccccctctctaccttctctagatcggcgttccggtccatgcatggttagggcccggtagttctacttctgttcatgtttgtgttagatccgtgtttgtgttagatccgtgctgctagcgttcgtacacggatgcgacctgtacgtcagacacgttctgattgctaacttgccagtgtttctctttggggaatcctgggatggctctagccgttccgcagacgggatcgatttcatgattttttttgtttcgttgcatagggtttggtttgcccttttcctttatttcaatatatgccgtgcacttgtttgtcgggtcatcttttcatgcttttttttgtcttggttgtgatgatgtggtctggttgggcggtcgttctagatcggagtagaattctgtttcaaactacctggtggatttattaattttggatctgtatgtgtgtgccatacatattcatagttacgaattgaagatgatggatggaaatatcgatctaggataggtatacatgttgatgcgggttttactgatgcatatacagagatgctttttgttcgcttggttgtgatgatgtggtgtggttgggcggtcgttcattcgttctagatcggagtagaatactgtttcaaactacctggtgtatttattaattttggaactgtatgtgtgtgtcatacatcttcatagttacgagtttaagatggatggaaatatcgatctaggataggtatacatgttgatgtgggttttactgatgcatatacatgatggcatatgcagcatctattcatatgctctaaccttgagtacctatctattataataaacaagtatgttttataattattttgatcttgatatacttggatgatggcatatgcagcagctatatgtggatttttttagccctgccttcatacgctatttatttgcttggtactgtttcttttgtcgatgctcaccctgttgtttggtgttacttctgcaggtcgactctagaggatccatgtacatcagcagggtcgagatcgaccgatataataggcgcaaggtcagggacctcacccacgtcggcgcctaccacgcctgggtcgaggagagcttccccagcgagctcgagcaatcaatcaggaccaggaagctctggcgcatcgaccgcatccagggcaaggactacctcatcatcgtcagcaaggagaagcccaacctccagaagctcgaaaaatatggcgtcgtcggcagcgcccagaccaaggactaccagcacttcctcgacagcatcaagaccggcttcaggatgaacttcaggatcgtcctcaaccccgtcatcagcatcaccagccccgacaaatcaaaacgcggcgtcgtcaagccccacgtcaccattaaacaccagatggacttcctcgtcaagcagagcgaaaaaaacggcttcagcctcgtcggcgagagcttctccatcgtcgagaggggctacgaggtgttccagaagcccgagaagcccatcaggctcagcaaggtcgtctacgagggcaccctcaccgtcagcgacgacacgctcttcaagaagatgctcaccgagggcgtcggcaagaagaaagcatatggcttcggcctcatgaccgtcgtccccctcgaggagagcagggccgaccccaagaagaagaggaaggtgggtcgggcgacatgtgccaaggacatccagaaggccgctgccgaagcggcgctcgcttttcaggacgaaacctgcgacaccaccaccaccaaccacggcctcgacatggaggaaacaatggtggaggccatctacacgcctgaacagagcgagggggctttctacatggacgaggaaaccatgttcggcatgcccacactcctcgacaacatggccgagggcatgctcctcccccccccgagcgtccagtggaaccacaactacgacggcgaaggcgacggcgacgtcagcctctggtcctactagtcttcgtaagttaacctagacttgtccatcttctggattggccaacttaattaatgtatgaaataaaaggatgcacacatagtgacatgctaatcactataatgtgggcatcaaagttgtgtgttatgtgtaattactagttatctgaataaaagagaaagagatcatccatatttcttatcctaaatgaatgtcacgtgtctttataattctttgatgaaccagatgcatttcattaaccaaatccatatacatataaatattaatcatatataattaatatcaattgggttagcaaaacaaatctagtctaggtgtgttttgc

SEQ ID NO: 113 - DNA, 4338 bp, Artificial
  UBI  cse1 gene with C-terminal linkage to AtCBF1 motif
gtgcagcgtgacccggtcgtgcccctctctagagataatgagcattgcatgtctaagttataaaaaattaccacatattttttttgtcacacttgtttgaagtgcagtttatctatctttatacatatatttaaactttactctacgaataatataatctatagtactacaataatatcagtgttttagagaatcatataaatgaacagttagacatggtctaaaggacaattgagtattttgacaacaggactctacagttttatctttttagtgtgcatgtgttctcctttttttttgcaaatagcttcacctatataatacttcatccattttattagtacatccatttagggtttagggttaatggtttttatagactaatttttttagtacatctattttattctattttagcctctaaattaagaaaactaaaactctattttagtttttttatttaataatttagatataaaatagaataaaataaagtgactaaaaattaaacaaataccctttaagaaattaaaaaaactaaggaaacatttttcttgtttcgagtagataatgccagcctgttaaacgccgtcgacgagtctaacggacaccaaccagcgaaccagcagcgtcgcgtcgggccaagcgaagcagacggcacggcatctctgtcgctgcctctggacccctctcgagagttccgctccaccgttggacttgctccgctgtcggcatccagaaattgcgtggcggagcggcagacgtgagccggcacggcaggcggcctcctcctcctctcacggcaccggcagctacgggggattcctttcccaccgctccttcgctttcccttcctcgcccgccgtaataaatagacaccccctccacaccctctttccccaacctcgtgttgttcggagcgcacacacacacaaccagatctcccccaaatccacccgtcggcacctccgcttcaaggtacgccgctcgtcctcccccccccccctctctaccttctctagatcggcgttccggtccatgcatggttagggcccggtagttctacttctgttcatgtttgtgttagatccgtgtttgtgttagatccgtgctgctagcgttcgtacacggatgcgacctgtacgtcagacacgttctgattgctaacttgccagtgtttctctttggggaatcctgggatggctctagccgttccgcagacgggatcgatttcatgattttttttgtttcgttgcatagggtttggtttgcccttttcctttatttcaatatatgccgtgcacttgtttgtcgggtcatcttttcatgcttttttttgtcttggttgtgatgatgtggtctggttgggcggtcgttctagatcggagtagaattctgtttcaaactacctggtggatttattaattttggatctgtatgtgtgtgccatacatattcatagttacgaattgaagatgatggatggaaatatcgatctaggataggtatacatgttgatgcgggttttactgatgcatatacagagatgctttttgttcgcttggttgtgatgatgtggtgtggttgggcggtcgttcattcgttctagatcggagtagaatactgtttcaaactacctggtgtatttattaattttggaactgtatgtgtgtgtcatacatcttcatagttacgagtttaagatggatggaaatatcgatctaggataggtatacatgttgatgtgggttttactgatgcatatacatgatggcatatgcagcatctattcatatgctctaaccttgagtacctatctattataataaacaagtatgttttataattattttgatcttgatatacttggatgatggcatatgcagcagctatatgtggatttttttagccctgccttcatacgctatttatttgcttggtactgtttcttttgtcgatgctcaccctgttgtttggtgttacttctgcaggtcgactctagaggatccatgagccgcttcaacctcctcgacgagccctggatcagcgtcatctacgacgagaagggcagcaccaaggacgtcagcctccaggacctcttcaccaacgcccaccagtacaaggagctcgccggcgacaccaagacccaggacttcgccgtcctcagggtcctcctcgccgtcctccacaccgtgttcagccgcttcgacatcgacggcaacgcctacgagtacctcaccatcgacgagggctggaaccagctcgagcccgtcgacgagatggacatcgagaactacgaggaggccctctatgaaacatgggagaagctctggaccaataaaagattccccaacatcgtcaatcaatacctcgagaagtggagggaccgcttctacctcttcgaccagaagtaccccttcttccaggtcaccaaggaggacatcgccggcgataaaattagcaaggccaagggcaccagcatcctcggcaaaaatataaatcgcatcatcagcgagagcggcaacaagatcgccctcttcagccccaaggacgaggaaaataaaaatactctcaccgccgccgagctcgccaggtggctcatcaccttccagggctacagcggcgtcagcgacaaggtcatcttcggcaatgaaaaatatacccccagcaagggctggctcttcgacatcggcgccatctacattaaaggcaacaccctcttcgaaaccctcctcctcaactacatcagcccctacaacgagtgcggcaatgtggaaaatatacagaggccctgctgggagaggaagagcagcgacatcattaaaagctacctcgatgaaaaagacatcaccaacatcgccagcctctacaccgtctggagcaagggcatctacatcgaccccgacttcaacctcaataaacccttcagcttcgacatcgtcaagctccccgacatcaaccaccgcgacaacttcctcgagcccatgaccctctggaagtacaacgtcagcggcaaaaatagggacagctacacccccaagaagcacctcctcaaccagagcctctggaggagcttcggcctcctgagcataaaagacaccgacctccagcacaggaagcccggcgtcatcgagtggctcacctacatcgacgatataataggcaacaggctcagcaacatcgtcgccatcagcatgcaggacgacggcaacccccagagcaggctgcccaccgacgaggtcatcgacagcatcttcatcaacgacctcgtcctcaccgacctcgacgagggcggctgggtccccaggatcaacgaggtcgtcgaggaaaccaagaagatcatcagcaggacatataaaacgtacattaatgatataaaggagatccgcaacatcagcaacggcagctacacccagcagatcgtcgagagcctctacttcaagatcgaccagcccttcaggcagtggctcgccagcatccagcccgaggacgacaaggacagcaagatccaggagtggcgcgtcctcctcaagaaaatagtcaaggccgaggccgaggtcatcctccaccagggcggcgccagggactacctcggcatccagaaggacggccgaattaagaacatcgccaccgcctacaacagcttcgacttctggctccgccagcagttaaaaagcagggccgaccccaagaagaagaggaaggtgggtcgggcgacatgtgccaaggacatccagaaggccgctgccgaagcggcgctcgcttttcaggacgaaacctgcgacaccaccaccaccaaccacggcctcgacatggaggaaacaatggtggaggccatctacacgcctgaacagagcgagggggctttctacatggacgaggaaaccatgttcggcatgcccacactcctcgacaacatggccgagggcatgctcctcccccccccgagcgtccagtggaaccacaactacgacggcgaaggcgacggcgacgtcagcctctggtcctactagtcttcgtaagttaacctagacttgtccatcttctggattggccaacttaattaatgtatgaaataaaaggatgcacacatagtgacatgctaatcactataatgtgggcatcaaagttgtgtgttatgtgtaattactagttatctgaataaaagagaaagagatcatccatatttcttatcctaaatgaatgtcacgtgtctttataattctttgatgaaccagatgcatttcattaaccaaatccatatacatataaatattaatcatatataattaatatcaattgggttagcaaaacaaatctagtctaggtgtgttttgc

SEQ ID NO: 114 - DNA, 1886 bp, Artificial
  GACT2 expression cassette
aaattctaaacgctaaagaggaagaggacagaaagaaaatctggcccaataaacaccattttaaattctaaacgctaaagaggaagaggacactgcagcccgggacaatcccactatccttcgcaagacccttcctctatataaggaagttcatttcatttggagaggactatttttacaacaattaccaacaacaacaaacaacaaacaacattacaattactatttacaattacaccatggcctcctccgaggacgtcatcaaggagttcatgcgcttcaaggtgcgcatggagggctccgtgaacggccacgagttcgagatcgagggcgagggcgagggccgcccctacgagggcacccagaccgccaagctgaaggtgaccaagggcggccccctgcccttcgcctgggacatcctgtccccccagttccagtacggctccaaggtgtacgtgaagcaccccgccgacatccccgactacaagaagctgtccttccccgagggcttcaagtgggagcgcgtgatgaacttcgaggacggcggcgtggtgaccgtgacccaggactcctccctgcaggacggctccttcatctacaaggtgaagttcatcggcgtgaacttcccctccgacggccccgtaatgcagaagaagactatgggctgggaggcctccaccgagcgcctgtacccccgcgacggcgtgctgaagggcgagatccacaaggccctgaagctgaaggacggcggccactacctggtggagttcaagtccatctacatggccaagaagcccgtgcagctgcccggctactactacgtggactccaagctggacatcacctcccacaacgaggactacaccatcgtggagcagtacgagcgcgccgagggccgccaccacctgttcctgtaggtcaactacccacggtaccagctgctgctgttctagggttcacaagtctgcctatttgtcttccccaatggagctatggttgtctggtctggtccttggtcgtgtcccgtttcattgtgtactatttacctgtaatgtgtatccttaagtctggtttgatggtgtctgaaacgttttgctgtggtagagcagcatggaagaactataatgaataagtgatccctaatcattgtgtccaaattttgcttctgctatacccttttgtgctgtttcttatgttttgcttaaaaatttgatctgacaaacaaatttgtctaaattatgctcttgttctgactgtgtactgtacacatttgtattgctaccggtttggcacatagttttctctttgattgcagatcaaacccttctgattgcagattgcttggctatggctgatgtgctcactgttcttctttagcttgtatattgctgatggtggcttggctacggctgaaaaagttgctgctgcgccgacttggcaactgttgctccagtaatgctttgtcctctcttcctagccgccgacttggcacttggcagctgttgctcctgtaatgcgttgttatctcttatctcttgagatgtactatgattttgaggctgtttgacttgtgccagattgccagtgctgatgctatattatctcaggtttttatgctagtatatgttttactgtgtgctgcctgtgtcgagttacgtaatctattgaaccgctatgcgtgttgatgccctgttgttgcttgccagattgatgcccctgttgcttgcagcttgcaagctgtagtgaaatcctaaaattccaaaccaaatctattctgaacttttgaagatctgtgatgtccggaagaaaagattcaaacagataaacgggactctccagaatctataaaataaatgatcgacaaacgctttgctttggtaggcttc

SEQ ID NO: 115 - DNA, 1102 bp, Artificial
  Spy dCas9 U6 polymerase III guide RNA expression construct targeting GACT2
tgagagtacaatgatgaacctagattaatcaatgccaaagtctgaaaaatgcaccctcagtctatgatccagaaaatcaagattgcttgaggccctgttcggttgttccggattagagccccggattaattcctagccggattacttctctaatttatatagattttgatgagctggaatgaatcctggcttattccggtacaaccgaacaggccctgaaggataccagtaatcgctgagctaaattggcatgctgtcagagtgtcagtattgcagcaaggtagtgagataaccggcatcatggtgccagtttgatggcaccattagggttagagatggtggccatgggcgcatgtcctggccaactttgtatgatatatggcagggtgaataggaaagtaaaattgtattgtaaaaagggatttcttctgtttgttagcgcatgtacaaggaatgcaagttttgagcgagggggcatcaaagatctggctgtgtttccagctgtttttgttagccccatcgaatccttgacataatgatcccgcttaaataagcaacctcgcttgtatagttccttgtgctctaacacacgatgatgataagtcgtaaaatagtggtgtccaaagaatttccaggcccagttgtaaaagctaaaatgctattcgaatttctactagcagtaagtcgtgtttagaaattatttttttatataccttttttccttctatgtacagtaggacacagtgtcagcgccgcgttgacggagaatatttgcaaaaaagtaaaagagaaagtcatagcggcgtatgtgccaaaaacttcgtcacagagagggccataagaaacatggcccacggcccaatacgaagcaccgcgacgaagcccaaacagcagtccgtaggtggagcaaagcgctgggtaatacgcaaacgttttgtcccaccttgactaatcacaagagtggagcgtaccttataaaccgagccgcaagcaccgaattgaggacagaaagaaaatcgttttagagctagaaatagcaagttaaaataaggctagtccgttatcaacttgaaaaagtggcaccgagtcggtgctttttttt

SEQ ID NO: 116 - DNA, 1097 bp, Artificial
  Sth7710 Cascade U6 polymerase III guide RNA expression construct targeting GACT2
tgagagtacaatgatgaacctagattaatcaatgccaaagtctgaaaaatgcaccctcagtctatgatccagaaaatcaagattgcttgaggccctgttcggttgttccggattagagccccggattaattcctagccggattacttctctaatttatatagattttgatgagctggaatgaatcctggcttattccggtacaaccgaacaggccctgaaggataccagtaatcgctgagctaaattggcatgctgtcagagtgtcagtattgcagcaaggtagtgagataaccggcatcatggtgccagtttgatggcaccattagggttagagatggtggccatgggcgcatgtcctggccaactttgtatgatatatggcagggtgaataggaaagtaaaattgtattgtaaaaagggatttcttctgtttgttagcgcatgtacaaggaatgcaagttttgagcgagggggcatcaaagatctggctgtgtttccagctgtttttgttagccccatcgaatccttgacataatgatcccgcttaaataagcaacctcgcttgtatagttccttgtgctctaacacacgatgatgataagtcgtaaaatagtggtgtccaaagaatttccaggcccagttgtaaaagctaaaatgctattcgaatttctactagcagtaagtcgtgtttagaaattatttttttatataccttttttccttctatgtacagtaggacacagtgtcagcgccgcgttgacggagaatatttgcaaaaaagtaaaagagaaagtcatagcggcgtatgtgccaaaaacttcgtcacagagagggccataagaaacatggcccacggcccaatacgaagcaccgcgacgaagcccaaacagcagtccgtaggtggagcaaagcgctgggtaatacgcaaacgttttgtcccaccttgactaatcacaagagtggagcgtaccttataaaccgagccgcaagcaccgaattgtttttcccgcacacgcgggggtgatccttctaaacgctaaagaggaagaggacagaaagagtttttcccgcacacgcgggggtgatcctttttttt

SEQ ID NO: 117 - DNA, 33 bp, Zea mays
gagggtctacttccatcaccgtcttgctcggtc

SEQ ID NO: 118 - DNA, 33 bp, Zea mays
cagcagtagtgttacagaagctaaactcaacca

SEQ ID NO: 119 - DNA, 33 bp, Zea mays
tttatggacagagctccaagtgaccgagcaaga

SEQ ID NO: 120 - DNA, 20 bp, Zea mays
gagctccaccaaagacaaag

SEQ ID NO: 121 - DNA, 20 bp, Zea mays
cagtgctataatatgagtgg

SEQ ID NO: 122 - DNA, 20 bp, Zea mays
ctccaagtgaccgagcaaga

SEQ ID NO: 123 - DNA, 1097 bp, Artificial
  Sth7710 Cascade U6 polymerase III guide RNA expression construct targeting A2+
tgagagtacaatgatgaacctagattaatcaatgccaaagtctgaaaaatgcaccctcagtctatgatccagaaaatcaagattgcttgaggccctgttcggttgttccggattagagccccggattaattcctagccggattacttctctaatttatatagattttgatgagctggaatgaatcctggcttattccggtacaaccgaacaggccctgaaggataccagtaatcgctgagctaaattggcatgctgtcagagtgtcagtattgcagcaaggtagtgagataaccggcatcatggtgccagtttgatggcaccattagggttagagatggtggccatgggcgcatgtcctggccaactttgtatgatatatggcagggtgaataggaaagtaaaattgtattgtaaaaagggatttcttctgtttgttagcgcatgtacaaggaatgcaagttttgagcgagggggcatcaaagatctggctgtgtttccagctgtttttgttagccccatcgaatccttgacataatgatcccgcttaaataagcaacctcgcttgtatagttccttgtgctctaacacacgatgatgataagtcgtaaaatagtggtgtccaaagaatttccaggcccagttgtaaaagctaaaatgctattcgaatttctactagcagtaagtcgtgtttagaaattatttttttatataccttttttccttctatgtacagtaggacacagtgtcagcgccgcgttgacggagaatatttgcaaaaaagtaaaagagaaagtcatagcggcgtatgtgccaaaaacttcgtcacagagagggccataagaaacatggcccacggcccaatacgaagcaccgcgacgaagcccaaacagcagtccgtaggtggagcaaagcgctgggtaatacgcaaacgttttgtcccaccttgactaatcacaagagtggagcgtaccttataaaccgagccgcaagcaccgaattgtttttcccgcacacgcgggggtgatccgagggtctacttccatcaccgtcttgctcggtcgtttttcccgcacacgcgggggtgatcctttttttt

SEQ ID NO: 124 - DNA, 1097 bp, Artificial
  Sth7710 Cascade U6 polymerase III guide RNA expression construct targeting A4+
tgagagtacaatgatgaacctagattaatcaatgccaaagtctgaaaaatgcaccctcagtctatgatccagaaaatcaagattgcttgaggccctgttcggttgttccggattagagccccggattaattcctagccggattacttctctaatttatatagattttgatgagctggaatgaatcctggcttattccggtacaaccgaacaggccctgaaggataccagtaatcgctgagctaaattggcatgctgtcagagtgtcagtattgcagcaaggtagtgagataaccggcatcatggtgccagtttgatggcaccattagggttagagatggtggccatgggcgcatgtcctggccaactttgtatgatatatggcagggtgaataggaaagtaaaattgtattgtaaaaagggatttcttctgtttgttagcgcatgtacaaggaatgcaagttttgagcgagggggcatcaaagatctggctgtgtttccagctgtttttgttagccccatcgaatccttgacataatgatcccgcttaaataagcaacctcgcttgtatagttccttgtgctctaacacacgatgatgataagtcgtaaaatagtggtgtccaaagaatttccaggcccagttgtaaaagctaaaatgctattcgaatttctactagcagtaagtcgtgtttagaaattatttttttatataccttttttccttctatgtacagtaggacacagtgtcagcgccgcgttgacggagaatatttgcaaaaaagtaaaagagaaagtcatagcggcgtatgtgccaaaaacttcgtcacagagagggccataagaaacatggcccacggcccaatacgaagcaccgcgacgaagcccaaacagcagtccgtaggtggagcaaagcgctgggtaatacgcaaacgttttgtcccaccttgactaatcacaagagtggagcgtaccttataaaccgagccgcaagcaccgaattgtttttcccgcacacgcgggggtgatcccagcagtagtgttacagaagctaaactcaaccagtttttcccgcacacgcgggggtgatcctttttttt

SEQ ID NO: 125 - DNA, 1097 bp, Artificial
  Sth7710 Cascade U6 polymerase III guide RNA expression construct targeting A1-
tgagagtacaatgatgaacctagattaatcaatgccaaagtctgaaaaatgcaccctcagtctatgatccagaaaatcaagattgcttgaggccctgttcggttgttccggattagagccccggattaattcctagccggattacttctctaatttatatagattttgatgagctggaatgaatcctggcttattccggtacaaccgaacaggccctgaaggataccagtaatcgctgagctaaattggcatgctgtcagagtgtcagtattgcagcaaggtagtgagataaccggcatcatggtgccagtttgatggcaccattagggttagagatggtggccatgggcgcatgtcctggccaactttgtatgatatatggcagggtgaataggaaagtaaaattgtattgtaaaaagggatttcttctgtttgttagcgcatgtacaaggaatgcaagttttgagcgagggggcatcaaagatctggctgtgtttccagctgtttttgttagccccatcgaatccttgacataatgatcccgcttaaataagcaacctcgcttgtatagttccttgtgctctaacacacgatgatgataagtcgtaaaatagtggtgtccaaagaatttccaggcccagttgtaaaagctaaaatgctattcgaatttctactagcagtaagtcgtgtttagaaattatttttttatataccttttttccttctatgtacagtaggacacagtgtcagcgccgcgttgacggagaatatttgcaaaaaagtaaaagagaaagtcatagcggcgtatgtgccaaaaacttcgtcacagagagggccataagaaacatggcccacggcccaatacgaagcaccgcgacgaagcccaaacagcagtccgtaggtggagcaaagcgctgggtaatacgcaaacgttttgtcccaccttgactaatcacaagagtggagcgtaccttataaaccgagccgcaagcaccgaattgtttttcccgcacacgcgggggtgatcctttatggacagagctccaagtgaccgagcaagagtttttcccgcacacgcgggggtgatcctttttttt

SEQ ID NO: 126 - DNA, 822 bp, Zea mays
atggggaggagggcgtgttgcgcgaaggaaggcgttaagagaggggcgtggacgagcaaggaggacgatgccttggccgcctacgtcaaggcccatggcgaaggcaaatggagggaagtgccccagaaagccggtttgcgtcggtgcggcaagagctgccggctgcggtggctgaactacctccggcccaacatcaggcgcggcaacatctcctacgacgaggaggatctcatcatccgcctccacaggctcctcggcaacaggtggtcgctgattgcaggcaggctgcctggccgaacagacaatgaaatcaagaactactggaacagcacgctgggccggagggcaggcgccggcgccggcgccggcggcagctgggtcgtcgtcgcgccggacaccggctcgcacgccaccccggccgcgacgtcgggcgcctgcgagaccggccagaatagcgccgctcatcgcgcggaccccgactcagccgggacgacgacgacctcggcggcggcggtgtgggcgcccaaggccgtgcggtgcacgggcggactcttcttcttccaccgggacacgacgccggcgcacgcgggcgagacggcgacgccaatggccggtggaggtggaggaggaggaggagaagcagggtcgtcggacgactgcagctcggcggcgtcggtatcgcttcgcgtcggaagccacgacgagccgtgcttctccggcgacggtgacggcgactggatggacgacgtgagggccctggcgtcgtttctcgagtccgacgaggactggctccgctgtcagacggccgggcagcttgcgtag

SEQ ID NO: 127 - DNA, 331 bp, Cauliflower Mosaic Virus
cgtcaacatggtggagcacgacactctcgtctactccaagaatatcaaagatacagtctcagaagaccaaagggctattgagacttttcaacaaagggtaatatcgggaaacctcctcggattccattgcccagctatctgtcacttcatcaaaaggacagtagaaaaggaaggtggcacctacaaatgccatcattgcgataaaggaaaggctatcgttcaagatgcctctgccgacagtggtcccaaagatggacccccacccacgaggagcatcgtggaaaaagaagacgttccaaccacgtcttcaaagcaagtggattgatgtgat

SEQ ID NO: 128 - DNA, 423 bp, Cauliflower Mosaic Virus
cgtcaacatggtggagcacgacactctcgtctactccaagaatatcaaagatacagtctcagaagaccaaagggctattgagacttttcaacaaagggtaatatcgggaaacctcctcggattccattgcccagctatctgtcacttcatcaaaaggacagtagaaaaggaaggtggcacctacaaatgccatcattgcgataaaggaaaggctatcgttcaagatgcctctgccgacagtggtcccaaagatggacccccacccacgaggagcatcgtggaaaaagaagacgttccaaccacgtcttcaaagcaagtggattgatgtgatatctccactgacgtaagggatgacgcacaatcccactatccttcgcaagacccttcctctatataaggaagttcatttcatttggagaggac

SEQ ID NO: 129 - DNA, 547 bp, Zea mays
gcaaaggtccgccttgtttctcctctgtctcttgatctgactaatcttggtttatgattcgttgagtaattttggggaaagcttcgtccacagtttttttttcgatgaacagtgccgcagtggcgctgatcttgtatgctatcctgcaatcgtggtgaacttatgtcttttatatccttcactaccatgaaaagactagtaatctttctcgatgtaacatcgtccagcactgctattaccgtgtggtccatccgacagtctggctgaacacatcatacgatattgagcaaagatcgatctatcttccctgttctttaatgaaagacgtcattttcatcagtatgatctaagaatgttgcaacttgcaaggaggcgtttctttctttgaatttaactaactcgttgagtggccctgtttctcggacgtaaggcctttgctgctccacacatgtccattcgaattttaccgtgtttagcaagggcgaaaagtttgcatcttgatgatttagcttgactatgcgattgctttcctggacccgtgcagctg

SEQ ID NO: 130 - DNA, 2778 bp, Artificial
  C1 gene over-expression cassette
tagaaatccgtcaacatggtggagcacgacactctcgtctactccaagaatatcaaagatacagtctcagaagaccaaagggctattgagacttttcaacaaagggtaatatcgggaaacctcctcggattccattgcccagctatctgtcacttcatcaaaaggacagtagaaaaggaaggtggcacctacaaatgccatcattgcgataaaggaaaggctatcgttcaagatgcctctgccgacagtggtcccaaagatggacccccacccacgaggagcatcgtggaaaaagaagacgttccaaccacgtcttcaaagcaagtggattgatgtgatgctctagaaatccgtcaacatggtggagcacgacactctcgtctactccaagaatatcaaagatacagtctcagaagaccaaagggctattgagacttttcaacaaagggtaatatcgggaaacctcctcggattccattgcccagctatctgtcacttcatcaaaaggacagtagaaaaggaaggtggcacctacaaatgccatcattgcgataaaggaaaggctatcgttcaagatgcctctgccgacagtggtcccaaagatggacccccacccacgaggagcatcgtggaaaaagaagacgttccaaccacgtcttcaaagcaagtggattgatgtgatatctccactgacgtaagggatgacgcacaatcccactatccttcgcaagacccttcctctatataaggaagttcatttcatttggagaggacgagctgcagcttatttttacaacaattaccaacaacaacaaacaacaaacaacattacaattactatttacaattacagtcgacggatcaagtgcaaaggtccgccttgtttctcctctgtctcttgatctgactaatcttggtttatgattcgttgagtaattttggggaaagcttcgtccacagtttttttttcgatgaacagtgccgcagtggcgctgatcttgtatgctatcctgcaatcgtggtgaacttatgtcttttatatccttcactaccatgaaaagactagtaatctttctcgatgtaacatcgtccagcactgctattaccgtgtggtccatccgacagtctggctgaacacatcatacgatattgagcaaagatcgatctatcttccctgttctttaatgaaagacgtcattttcatcagtatgatctaagaatgttgcaacttgcaaggaggcgtttctttctttgaatttaactaactcgttgagtggccctgtttctcggacgtaaggcctttgctgctccacacatgtccattcgaattttaccgtgtttagcaagggcgaaaagtttgcatcttgatgatttagcttgactatgcgattgctttcctggacccgtgcagctgcggacggatccccgggtaccgagctcgaattccgcgcgatggggaggagggcgtgttgcgcgaaggaaggcgttaagagaggggcgtggacgagcaaggaggacgatgccttggccgcctacgtcaaggcccatggcgaaggcaaatggagggaagtgccccagaaagccggtttgcgtcggtgcggcaagagctgccggctgcggtggctgaactacctccggcccaacatcaggcgcggcaacatctcctacgacgaggaggatctcatcatccgcctccacaggctcctcggcaacaggtggtcgctgattgcaggcaggctgcctggccgaacagacaatgaaatcaagaactactggaacagcacgctgggccggagggcaggcgccggcgccggcgccggcggcagctgggtcgtcgtcgcgccggacaccggctcgcacgccaccccggccgcgacgtcgggcgcctgcgagaccggccagaatagcgccgctcatcgcgcggaccccgactcagccgggacgacgacgacctcggcggcggcggtgtgggcgcccaaggccgtgcggtgcacgggcggactcttcttcttccaccgggacacgacgccggcgcacgcgggcgagacggcgacgccaatggccggtggaggtggaggaggaggaggagaagcagggtcgtcggacgactgcagctcggcggcgtcggtatcgcttcgcgtcggaagccacgacgagccgtgcttctccggcgacggtgacggcgactggatggacgacgtgagggccctggcgtcgtttctcgagtccgacgaggactggctccgctgtcagacggccgggcagcttgcgtagacaacaagtacacgtatagatgtccaataagcacgaggcccgcgagcccggcacgaagcccgctttttgggcccggtccgagcccggcacggcccggttatatgcagacccgggccggcccggcacgaataagcgggccgggctcggacaggaaattaggcacggtgagctagaggatccaccatggttaacctagacttgtccatcttctggattggccaacttaattaatgtatgaaataaaaggatgcacacatagtgacatgctaatcactataatgtgggcatcaaagttgtgtgttatgtgtaattactagttatctgaataaaagagaaagagatcatccatatttcttatcctaaatgaatgtcacgtgtctttataattctttgatgaaccagatgcatttcattaaccaaatccatatacatataaatattaatcatatataattaatatcaattgggttagcaaaacaaatctagtctaggtgtgttttgcga

SEQ ID NO: 131 - DNA, 1830 bp, Zea mays
atggcgctttcagcttcccgagttcagcaggcggaagaactgctgcaacgacctgctgagaggcagctgatgaggagccagcttgctgcagccgccaggagcatcaactggagctacgccctcttctggtccatttcagacactcaaccaggggtgctgacgtggacggacgggttctacaacggcgaggtgaagacgcggaagatctccaactccgtggagctgacatccgaccagctcgtcatgcagaggagcgaccagctccgggagctctacgaggccctcctgtcgggcgagggcgaccgccgcgctgcgcctgcgcggccggccggctctctgtcgccggaggacctcggcgacaccgagtggtactacgtggtctccatgacctacgccttccggccaggccaagggttgcccggcaggagtttcgcgagcgacgagcatgtctggctgtgcaacgcgcacctcgccggcagcaaagccttcccccgcgcgctcctggccaagagcgcgtccattcagtcaatcctctgcatcccggttatgggcggcgtgcttgagcttggtacaactgacacggtgccggaggccccggacttggtcagccgagcaaccgcggctttctgggagccgcagtgcccgagctccagcccgtcaggacgagcaaacgagaccggcgaggccgcagcagacgacggcacgtttgcgttcgaggaactcgaccacaataatggcatggacgacatagaggcgatgaccgccgccgggggacacgggcaggaggaggagctaagactaagagaagccgaggccctgtcagacgacgcaagcctggagcacatcaccaaggagatcgaggagttctacagcctctgcgacgaaatggacctgcaggcgctaccactaccgctagaggacggctggaccgtggacgcgtccaatttcgaggtcccctgctcttccccgcagccagcgccgcctccggtggatagggctaccgctaacgtcgccgccgacgcctcaagggcacccgtctacggctctcgcgcgacgagtttcatggcttggacgaggtcctcgcagcagtcgtcgtgctccgacgacgcggcgcccgcagcagtagtgccggccatcgaggagccgcagagattgctgaagaaagtggtggccggcggcggtgcttgggagagctgtggcggcgcgacgggagcagcacaggaaatgagtggcactggcaccaagaaccacgtcatgtcggagcgaaagcgacgagagaagctcaacgagatgttcctcgtcctcaagtcactgcttccgtccattcacagggtgaacaaagcgtcgatcctcgccgaaacgatagcctacctcaaggagcttcagagaagggtgcaagagctggagtccagtagggaacctgcgtcgcgcccatccgaaacgacgacaaggctaataacaaggccctcccgtggcaataatgagagtgtgaggaaggaggtctgcgcgggctccaagaggaagagcccagagctcggcagagacgacgtggagcgccccccggtcctcaccatggacgccggcaccagcaacgtcaccgtcaccgtctcggacaaggatgtgctcctggaggtgcagtgccggtgggaggagctcctgatgacgcgagtgttcgacgccatcaagagcctccatttggacgtcctctcggttcaggcttcagcgccagatggcttcatggggcttaagatacgagctcagtttgctggctccggtgccgtcgtgccctggatgatcagcgaggctcttcgcaaagctatagggaagcgg

SEQ ID NO: 132 - DNA, 4187 bp, Artificial
  R1 gene over-expression cassette
ctgcagtgcagcgtgacccggtcgtgcccctctctagagataatgagcattgcatgtctaagttataaaaaattaccacatattttttttgtcacacttgtttgaagtgcagtttatctatctttatacatatatttaaactttactctacgaataatataatctatagtactacaataatatcagtgttttagagaatcatataaatgaacagttagacatggtctaaaggacaattgagtattttgacaacaggactctacagttttatctttttagtgtgcatgtgttctcctttttttttgcaaatagcttcacctatataatacttcatccattttattagtacatccatttagggtttagggttaatggtttttatagactaatttttttagtacatctattttattctattttagcctctaaattaagaaaactaaaactctattttagtttttttatttaataatttagatataaaatagaataaaataaagtgactaaaaattaaacaaataccctttaagaaattaaaaaaactaaggaaacatttttcttgtttcgagtagataatgccagcctgttaaacgccgtcgacgagtctaacggacaccaaccagcgaaccagcagcgtcgcgtcgggccaagcgaagcagacggcacggcatctctgtcgctgcctctggacccctctcgagagttccgctccaccgttggacttgctccgctgtcggcatccagaaattgcgtggcggagcggcagacgtgagccggcacggcaggcggcctcctcctcctctcacggcacggcagctacgggggattcctttcccaccgctccttcgctttcccttcctcgcccgccgtaataaatagacaccccctccacaccctctttccccaacctcgtgttgttcggagcgcacacacacacaaccagatctcccccaaatccacccgtcggcacctccgcttcaaggtacgccgctcgtcctccccccccccccctctctaccttctctagatcggcgttccggtccatggttagggcccggtagttctacttctgttcatgtttgtgttagatccgtgtttgtgttagatccgtgctgctagcgttcgtacacggatgcgacctgtacgtcagacacgttctgattgctaacttgccagtgtttctctttggggaatcctgggatggctctagccgttccgcagacgggatcgatttcatgattttttttgtttcgttgcatagggtttggtttgcccttttcctttatttcaatatatgccgtgcacttgtttgtcgggtcatcttttcatgcttttttttgtcttggttgtgatgatgtggtctggttgggcggtcgttctagatcggagtagaattctgtttcaaactacctggtggatttattaattttggatctgtatgtgtgtgccatacatattcatagttacgaattgaagatgatggatggaaatatcgatctaggataggtatacatgttgatgcgggttttactgatgcatatacagagatgctttttgttcgcttggttgtgatgatgtggtgtggttgggcggtcgttcattcgttctagatcggagtagaatactgtttcaaactacctggtgtatttattaattttggaactgtatgtgtgtgtcatacatcttcatagttacgagtttaagatggatggaaatatcgatctaggataggtatacatgttgatgtgggttttactgatgcatatacatgatggcatatgcagcatctattcatatgctctaaccttgagtacctatctattataataaacaagtatgttttataattattttgatcttgatatacttggatgatggcatatgcagcagctatatgtggatttttttagccctgccttcatacgctatttatttgcttggtactgtttcttttgtcgatgctcaccctgttgtttggtgttacttctgcaggtcgactctagaggatccaccatggcgctttcagcttcccgagttcagcaggcggaagaactgctgcaacgacctgctgagaggcagctgatgaggagccagcttgctgcagccgccaggagcatcaactggagctacgccctcttctggtccatttcagacactcaaccaggggtgctgacgtggacggacgggttctacaacggcgaggtgaagacgcggaagatctccaactccgtggagctgacatccgaccagctcgtcatgcagaggagcgaccagctccgggagctctacgaggccctcctgtcgggcgagggcgaccgccgcgctgcgcctgcgcggccggccggctctctgtcgccggaggacctcggcgacaccgagtggtactacgtggtctccatgacctacgccttccggccaggccaagggttgcccggcaggagtttcgcgagcgacgagcatgtctggctgtgcaacgcgcacctcgccggcagcaaagccttcccccgcgcgctcctggccaagagcgcgtccattcagtcaatcctctgcatcccggttatgggcggcgtgcttgagcttggtacaactgacacggtgccggaggccccggacttggtcagccgagcaaccgcggctttctgggagccgcagtgcccgagctccagcccgtcaggacgagcaaacgagaccggcgaggccgcagcagacgacggcacgtttgcgttcgaggaactcgaccacaataatggcatggacgacatagaggcgatgaccgccgccgggggacacgggcaggaggaggagctaagactaagagaagccgaggccctgtcagacgacgcaagcctggagcacatcaccaaggagatcgaggagttctacagcctctgcgacgaaatggacctgcaggcgctaccactaccgctagaggacggctggaccgtggacgcgtccaatttcgaggtcccctgctcttccccgcagccagcgccgcctccggtggatagggctaccgctaacgtcgccgccgacgcctcaagggcacccgtctacggctctcgcgcgacgagtttcatggcttggacgaggtcctcgcagcagtcgtcgtgctccgacgacgcggcgcccgcagcagtagtgccggccatcgaggagccgcagagattgctgaagaaagtggtggccggcggcggtgcttgggagagctgtggcggcgcgacgggagcagcacaggaaatgagtggcactggcaccaagaaccacgtcatgtcggagcgaaagcgacgagagaagctcaacgagatgttcctcgtcctcaagtcactgcttccgtccattcacagggtgaacaaagcgtcgatcctcgccgaaacgatagcctacctcaaggagcttcagagaagggtgcaagagctggagtccagtagggaacctgcgtcgcgcccatccgaaacgacgacaaggctaataacaaggccctcccgtggcaataatgagagtgtgaggaaggaggtctgcgcgggctccaagaggaagagcccagagctcggcagagacgacgtggagcgccccccggtcctcaccatggacgccggcaccagcaacgtcaccgtcaccgtctcggacaaggatgtgctcctggaggtgcagtgccggtgggaggagctcctgatgacgcgagtgttcgacgccatcaagagcctccatttggacgtcctctcggttcaggcttcagcgccagatggcttcatggggcttaagatacgagctcagtttgctggctccggtgccgtcgtgccctggatgatcagcgaggctcttcgcaaagctatagggaagcggtgaactctagaggatccaccatggttaacctagacttgtccatcttctggattggccaacttaattaatgtatgaaataaaaggatgcacacatagtgacatgctaatcactataatgtgggcatcaaagttgtgtgttatgtgtaattactagttatctgaataaaagagaaagagatcatccatatttcttatcctaaatgaatgtcacgtgtctttataattctttgatgaaccagatgcatttcattaaccaaatccatatacatataaatattaatcatatataattaatatcaattgggttagcaaaacaaatctagtctaggtgtgttttgcgaatt

SEQ ID NO: 133 - DNA, 1104 bp, Artificial
  Spy dCas9 U6 polymerase III guide RNA expression construct targeting A3+
tgagagtacaatgatgaacctagattaatcaatgccaaagtctgaaaaatgcaccctcagtctatgatccagaaaatcaagattgcttgaggccctgttcggttgttccggattagagccccggattaattcctagccggattacttctctaatttatatagattttgatgagctggaatgaatcctggcttattccggtacaaccgaacaggccctgaaggataccagtaatcgctgagctaaattggcatgctgtcagagtgtcagtattgcagcaaggtagtgagataaccggcatcatggtgccagtttgatggcaccattagggttagagatggtggccatgggcgcatgtcctggccaactttgtatgatatatggcagggtgaataggaaagtaaaattgtattgtaaaaagggatttcttctgtttgttagcgcatgtacaaggaatgcaagttttgagcgagggggcatcaaagatctggctgtgtttccagctgtttttgttagccccatcgaatccttgacataatgatcccgcttaaataagcaacctcgcttgtatagttccttgtgctctaacacacgatgatgataagtcgtaaaatagtggtgtccaaagaatttccaggcccagttgtaaaagctaaaatgctattcgaatttctactagcagtaagtcgtgtttagaaattatttttttatataccttttttccttctatgtacagtaggacacagtgtcagcgccgcgttgacggagaatatttgcaaaaaagtaaaagagaaagtcatagcggcgtatgtgccaaaaacttcgtcacagagagggccataagaaacatggcccacggcccaatacgaagcaccgcgacgaagcccaaacagcagtccgtaggtggagcaaagcgctgggtaatacgcaaacgttttgtcccaccttgactaatcacaagagtggagcgtaccttataaaccgagccgcaagcaccgaattgagctccaccaaagacaaaggttttagagctagaaatagcaagttaaaataaggctagtccgttatcaacttgaaaaagtggcaccgagtcggtgctttttttt

SEQ ID NO: 134 - DNA, 1104 bp, Artificial
  Spy dCas9 U6 polymerase III guide RNA expression construct targeting A7+
tgagagtacaatgatgaacctagattaatcaatgccaaagtctgaaaaatgcaccctcagtctatgatccagaaaatcaagattgcttgaggccctgttcggttgttccggattagagccccggattaattcctagccggattacttctctaatttatatagattttgatgagctggaatgaatcctggcttattccggtacaaccgaacaggccctgaaggataccagtaatcgctgagctaaattggcatgctgtcagagtgtcagtattgcagcaaggtagtgagataaccggcatcatggtgccagtttgatggcaccattagggttagagatggtggccatgggcgcatgtcctggccaactttgtatgatatatggcagggtgaataggaaagtaaaattgtattgtaaaaagggatttcttctgtttgttagcgcatgtacaaggaatgcaagttttgagcgagggggcatcaaagatctggctgtgtttccagctgtttttgttagccccatcgaatccttgacataatgatcccgcttaaataagcaacctcgcttgtatagttccttgtgctctaacacacgatgatgataagtcgtaaaatagtggtgtccaaagaatttccaggcccagttgtaaaagctaaaatgctattcgaatttctactagcagtaagtcgtgtttagaaattatttttttatataccttttttccttctatgtacagtaggacacagtgtcagcgccgcgttgacggagaatatttgcaaaaaagtaaaagagaaagtcatagcggcgtatgtgccaaaaacttcgtcacagagagggccataagaaacatggcccacggcccaatacgaagcaccgcgacgaagcccaaacagcagtccgtaggtggagcaaagcgctgggtaatacgcaaacgttttgtcccaccttgactaatcacaagagtggagcgtaccttataaaccgagccgcaagcaccgaattcagtgctataatatgagtgggttttagagctagaaatagcaagttaaaataaggctagtccgttatcaacttgaaaaagtggcaccgagtcggtgctttttttt

SEQ ID NO: 135 - DNA, 1104 bp, Artificial
  Spy dCas9 U6 polymerase III guide RNA expression construct targeting A2-
tgagagtacaatgatgaacctagattaatcaatgccaaagtctgaaaaatgcaccctcagtctatgatccagaaaatcaagattgcttgaggccctgttcggttgttccggattagagccccggattaattcctagccggattacttctctaatttatatagattttgatgagctggaatgaatcctggcttattccggtacaaccgaacaggccctgaaggataccagtaatcgctgagctaaattggcatgctgtcagagtgtcagtattgcagcaaggtagtgagataaccggcatcatggtgccagtttgatggcaccattagggttagagatggtggccatgggcgcatgtcctggccaactttgtatgatatatggcagggtgaataggaaagtaaaattgtattgtaaaaagggatttcttctgtttgttagcgcatgtacaaggaatgcaagttttgagcgagggggcatcaaagatctggctgtgtttccagctgtttttgttagccccatcgaatccttgacataatgatcccgcttaaataagcaacctcgcttgtatagttccttgtgctctaacacacgatgatgataagtcgtaaaatagtggtgtccaaagaatttccaggcccagttgtaaaagctaaaatgctattcgaatttctactagcagtaagtcgtgtttagaaattatttttttatataccttttttccttctatgtacagtaggacacagtgtcagcgccgcgttgacggagaatatttgcaaaaaagtaaaagagaaagtcatagcggcgtatgtgccaaaaacttcgtcacagagagggccataagaaacatggcccacggcccaatacgaagcaccgcgacgaagcccaaacagcagtccgtaggtggagcaaagcgctgggtaatacgcaaacgttttgtcccaccttgactaatcacaagagtggagcgtaccttataaaccgagccgcaagcaccgaattctccaagtgaccgagcaagagttttagagctagaaatagcaagttaaaataaggctagtccgttatcaacttgaaaaagtggcaccgagtcggtgctttttttt

SEQ ID NO: 136 - DNA, 113 bp, Zea mays
gaaaaagaggggtcgtgtagtgcttaaactgtacatgaacagcagtagtgttacagaagctaaactcaaccagagctccaccaaagacaaagagggtctacttccatcaccgt

SEQ ID NO: 137 - DNA, 93 bp, Zea mays
gaaaaagaggggtcgtgtagtgcttaaactgtacatgaacagcagtagtgcagagctccaccaaagacaaagagggtctacttccatcaccgt

SEQ ID NO: 138 - DNA, 112 bp, Zea mays
gaaaaagaggggtcgtgtagtgcttaactgtacatgaacagcagtagtgttacagaagctaaactcaaccagagctccaccaaagacaaagagggtctacttccatcaccgt

SEQ ID NO: 139 - DNA, 112 bp, Zea mays
gaaaaagaggggtcgtgtagtgcttaaactgtacatgaacagcagtagtgttacagaagctaaactaaccagagctccaccaaagacaaagagggtctacttccatcaccgt

SEQ ID NO: 140 - DNA, 100 bp, Zea mays
gaaaaagaggggtcgtgtagtgcttaaactgtacatgaacagcaagctaaactcaaccagagctccaccaaagacaaagagggtctacttccatcaccgt

SEQ ID NO: 141 - DNA, 96 bp, Zea mays
gaaaaagaggggtcgtgtagtgcagcagtagtgttacagaagctaaactcaaccagagctccaccaaagacaaagagggtctacttccatcaccgt

SEQ ID NO: 142 - DNA, 47 bp, Zea mays
gaaaaagaggggtcgtgtagtgcttaaactgtacattccatcaccgt

SEQ ID NO: 143 - DNA, 111 bp, Zea mays
gaaaaagaggggtcgtgtagtgcttaaactgtacatgaacagcagtagtgttagaagctaaactcaaccagagctccaccaaagacaaagagggtctacttccatcaccgt

SEQ ID NO: 144 - DNA, 112 bp, Zea mays
gaaaaagaggggtcgtgtagtgcttaaactgtacatgaacagcagtagtgttacagaagctaaactcaacagagctccaccaaagacaaagagggtctacttccatcaccgt

SEQ ID NO: 145 - DNA, 112 bp, Zea mays
gaaaaagaggggtcgtgtagtgcttaaactgtacatgaacagcagtagtgtacagaagctaaactcaaccagagctccaccaaagacaaagagggtctacttccatcaccgt

SEQ ID NO: 146 - DNA, 89 bp, Zea mays
gaaaaagaggggtcgtgtagtgcttaaactgtacatgaacatcaaccagagctccaccaaagacaaagagggtctacttccatcaccgt

SEQ ID NO: 147 - DNA, 112 bp, Zea mays
gaaaaagaggggtcgtgtagtgcttaaactgtacatgaacagcagtagtgttcagaagctaaactcaaccagagctccaccaaagacaaagagggtctacttccatcaccgt

SEQ ID NO: 148 - DNA, 86 bp, Zea mays
gaaaaagaggggtcgtgtagtgcttaaactgtacatgaacagcagtagtgttaccaaagacaaagagggtctacttccatcaccgt

SEQ ID NO: 149 - DNA, 112 bp, Zea mays
gaaaaagaggggtcgtgtagtgcttaaactgtacatgaacagcagtagtgttacagaagctaaactcaccagagctccaccaaagacaaagagggtctacttccatcaccgt

SEQ ID NO: 150 - DNA, 93 bp, Zea mays; identical to SEQ ID NO: 137

SEQ ID NO: 151 - DNA, 112 bp, Zea mays
gaaaaagaggggtcgtgtagtgcttaaactgacatgaacagcagtagtgttacagaagctaaactcaaccagagctccaccaaagacaaagagggtctacttccatcaccgt

SEQ ID NO: 152 - DNA, 88 bp, Zea mays
gaaaaagaggggtcgtgtagtgcttaaactgtacatgaacagcagtagagctccaccaaagacaaagagggtctacttccatcaccgt

SEQ ID NO: 153 - DNA, 112 bp, Zea mays
gaaaaagaggggtcgtgtgtgcttaaactgtacatgaacagcagtagtgttacagaagctaaactcaaccagagctccaccaaagacaaagagggtctacttccatcaccgt

SEQ ID NO: 154 - DNA, 112 bp, Zea mays; identical to SEQ ID NO: 145

SEQ ID NO: 155 - DNA, 53 bp, Zea mays
gaaaaagaggggtagctccaccaaagacaaagagggtctacttccatcaccgt

SEQ ID NO: 156 - DNA, 112 bp, Zea mays; identical to SEQ ID NO: 153

SEQ ID NO: 157 - DNA, 112 bp, Zea mays
gaaaaagaggggtcgtgtagtgctaaactgtacatgaacagcagtagtgttacagaagctaaactcaaccagagctccaccaaagacaaagagggtctacttccatcaccgt

SEQ ID NO: 158 - DNA, 112 bp, Zea mays
gaaaaagaggggtcgtgtagtgcttaaactgtacataacagcagtagtgttacagaagctaaactcaaccagagctccaccaaagacaaagagggtctacttccatcaccgt

SEQ ID NO: 159 - DNA, 111 bp, Zea mays
gaaaaagaggggtcgtgtagtgcttactgtacatgaacagcagtagtgttacagaagctaaactcaaccagagctccaccaaagacaaagagggtctacttccatcaccgt

SEQ ID NO: 160 - DNA, 112 bp, Zea mays
gaaaaagaggggtcgtgtagtgcttaaactgtacatgacagcagtagtgttacagaagctaaactcaaccagagctccaccaaagacaaagagggtctacttccatcaccgt

SEQ ID NO: 161 - DNA, 112 bp, Zea mays
gaaaaagaggggtcgtgtagtgcttaaactgtacatgaacagcagtgtgttacagaagctaaactcaaccagagctccaccaaagacaaagagggtctacttccatcaccgt

SEQ ID NO: 162 - DNA, 86 bp, Zea mays; identical to SEQ ID NO: 148

SEQ ID NO: 163 - DNA, 33 bp, Zea mays
cactactgctgttcatgtacagtttaagcacta

SEQ ID NO: 164 - DNA, 1097 bp, Artificial
  Sth7710 Cascade U6 polymerase III guide RNA expression construct targeting A3-
tgagagtacaatgatgaacctagattaatcaatgccaaagtctgaaaaatgcaccctcagtctatgatccagaaaatcaagattgcttgaggccctgttcggttgttccggattagagccccggattaattcctagccggattacttctctaatttatatagattttgatgagctggaatgaatcctggcttattccggtacaaccgaacaggccctgaaggataccagtaatcgctgagctaaattggcatgctgtcagagtgtcagtattgcagcaaggtagtgagataaccggcatcatggtgccagtttgatggcaccattagggttagagatggtggccatgggcgcatgtcctggccaactttgtatgatatatggcagggtgaataggaaagtaaaattgtattgtaaaaagggatttcttctgtttgttagcgcatgtacaaggaatgcaagttttgagcgagggggcatcaaagatctggctgtgtttccagctgtttttgttagccccatcgaatccttgacataatgatcccgcttaaataagcaacctcgcttgtatagttccttgtgctctaacacacgatgatgataagtcgtaaaatagtggtgtccaaagaatttccaggcccagttgtaaaagctaaaatgctattcgaatttctactagcagtaagtcgtgtttagaaattatttttttatataccttttttccttctatgtacagtaggacacagtgtcagcgccgcgttgacggagaatatttgcaaaaaagtaaaagagaaagtcatagcggcgtatgtgccaaaaacttcgtcacagagagggccataagaaacatggcccacggcccaatacgaagcaccgcgacgaagcccaaacagcagtccgtaggtggagcaaagcgctgggtaatacgcaaacgttttgtcccaccttgactaatcacaagagtggagcgtaccttataaaccgagccgcaagcaccgaattgtttttcccgcacacgcgggggtgatcccactactgctgttcatgtacagtttaagcactagtttttcccgcacacgcgggggtgatcctttttttt

SEQ ID NO: 165 - DNA, 603 bp, Escherichia virus T4
atgaaaagcggaatttatcagattaaaaatactttaaacaataaagtatatgtaggaagtgctaaagattttgaaaagagatggaagaggcattttaaagatttagaaaaaggatgccattcttctataaaacttcagaggtcttttaacaaacatggtaatgtgtttgaatgttctattttggaagaaattccatatgagaaagatttgattattgaacgagaaaatttttggattaaagagcttaattctaaaattaatggatacaatattgctgatgcaacgtttggtgatacatgttctacgcatccattaaaagaagaaattattaagaaacgttctgaaactgttaaagctaagatgcttaaacttggacctgatggtcggaaagctctttacagtaaacccggaagtaaaaacgggcgttggaatccagaaacccataagttttgtaagtgcggtgttcgcatacaaacttctgcttatacttgtagtaaatgcagaaatcgttcaggtgaaaataattcattctttaatcataagcattcagacataactaaatctaaaatatcagaaaagatgaaaggtaaaaagcctagtaat

SEQ ID NO: 166 - DNA, 606 bp, Artificial
  sequence encoding I-TevI amino terminal nuclease domain
atgggcaagagcggcatctaccagattaaaaacaccctcaacaacaaggtctacgtcggcagcgccaaggacttcgagaagaggtggaagaggcacttcaaggacctggagaagggctgccacagcagcattaaactccagcgcagcttcaacaagcacggcaacgtgttcgagtgcagcatcctggaggagatcccctatgaaaaagacctcatcatcgagcgcgagaacttctggattaaagagctcaacagcaaaattaacggctacaacatcgccgacgccaccttcggcgacacctgcagcacccaccccctaaaggaggagatcattaaaaagcgcagcgaaaccgtcaaggccaagatgctcaagctcggccccgacggccgcaaggccctctacagcaagcccggcagcaagaacgggaggtggaaccccgaaacccataaattctgcaagtgcggcgtccgcatccagaccagcgcctacacctgcagcaagtgccgcaaccgcagcggcgagaacaacagcttcttcaaccataaacacagcgacatcaccaagagcaagatcagcgagaagatgaaaggcaagaagcccagcaac

SEQ ID NO: 167 - DNA, 1467 bp, Artificial
  nuclease enabled I-TevI:cas6:NLS
atgggcaagagcggcatctaccagattaaaaacaccctcaacaacaaggtctacgtcggcagcgccaaggacttcgagaagaggtggaagaggcacttcaaggacctggagaaggtaagtttctgcttctacctttgatatatatataataattatcattaattagtagtaatataatatttcaaatatttttttcaaaataaaagaatgtagtatatagcaattgcttttctgtagtttataagtgtgtatattttaatttataacttttctaatatatgaccaaaacatggtgatgtgcagggctgccacagcagcattaaactccagcgcagcttcaacaagcacggcaacgtgttcgagtgcagcatcctggaggagatcccctatgaaaaagacctcatcatcgagcgcgagaacttctggattaaagagctcaacagcaaaattaacggctacaacatcgccgacgccaccttcggcgacacctgcagcacccaccccctaaaggaggagatcattaaaaagcgcagcgaaaccgtcaaggccaagatgctcaagctcggccccgacggccgcaaggccctctacagcaagcccggcagcaagaacgggaggtggaaccccgaaacccataaattctgcaagtgcggcgtccgcatccagaccagcgcctacacctgcagcaagtgccgcaaccgcagcggcgagaacaacagcttcttcaaccataaacacagcgacatcaccaagagcaagatcagcgagaagatgaaaggcaagaagcccagcaacatgtacatcagcagggtcgagatcgaccgatataataggcgcaaggtcagggacctcacccacgtcggcgcctaccacgcctgggtcgaggagagcttccccagcgagctcgagcaatcaatcaggaccaggaagctctggcgcatcgaccgcatccagggcaaggactacctcatcatcgtcagcaaggagaagcccaacctccagaagctcgaaaaatatggcgtcgtcggcagcgcccagaccaaggactaccagcacttcctcgacagcatcaagaccggcttcaggatgaacttcaggatcgtcctcaaccccgtcatcagcatcaccagccccgacaaatcaaaacgcggcgtcgtcaagccccacgtcaccattaaacaccagatggacttcctcgtcaagcagagcgaaaaaaacggcttcagcctcgtcggcgagagcttctccatcgtcgagaggggctacgaggtgttccagaagcccgagaagcccatcaggctcagcaaggtcgtctacgagggcaccctcaccgtcagcgacgacacgctcttcaagaagatgctcaccgagggcgtcggcaagaagaaagcatatggcttcggcctcatgaccgtcgtccccctcgaggagagcagggccgaccccaagaagaagaggaaggtctag

SEQ ID NO: 168 - DNA, 1476 bp, Artificial
  nuclease enabled I-TevI:GRA:cas6:NLS
atgggcaagagcggcatctaccagattaaaaacaccctcaacaacaaggtctacgtcggcagcgccaaggacttcgagaagaggtggaagaggcacttcaaggacctggagaaggtaagtttctgcttctacctttgatatatatataataattatcattaattagtagtaatataatatttcaaatatttttttcaaaataaaagaatgtagtatatagcaattgcttttctgtagtttataagtgtgtatattttaatttataacttttctaatatatgaccaaaacatggtgatgtgcagggctgccacagcagcattaaactccagcgcagcttcaacaagcacggcaacgtgttcgagtgcagcatcctggaggagatcccctatgaaaaagacctcatcatcgagcgcgagaacttctggattaaagagctcaacagcaaaattaacggctacaacatcgccgacgccaccttcggcgacacctgcagcacccaccccctaaaggaggagatcattaaaaagcgcagcgaaaccgtcaaggccaagatgctcaagctcggccccgacggccgcaaggccctctacagcaagcccggcagcaagaacgggaggtggaaccccgaaacccataaattctgcaagtgcggcgtccgcatccagaccagcgcctacacctgcagcaagtgccgcaaccgcagcggcgagaacaacagcttcttcaaccataaacacagcgacatcaccaagagcaagatcagcgagaagatgaaaggcaagaagcccagcaacggcagggctatgtacatcagcagggtcgagatcgaccgatataataggcgcaaggtcagggacctcacccacgtcggcgcctaccacgcctgggtcgaggagagcttccccagcgagctcgagcaatcaatcaggaccaggaagctctggcgcatcgaccgcatccagggcaaggactacctcatcatcgtcagcaaggagaagcccaacctccagaagctcgaaaaatatggcgtcgtcggcagcgcccagaccaaggactaccagcacttcctcgacagcatcaagaccggcttcaggatgaacttcaggatcgtcctcaaccccgtcatcagcatcaccagccccgacaaatcaaaacgcggcgtcgtcaagccccacgtcaccattaaacaccagatggacttcctcgtcaagcagagcgaaaaaaacggcttcagcctcgtcggcgagagcttctccatcgtcgagaggggctacgaggtgttccagaagcccgagaagcccatcaggctcagcaaggtcgtctacgagggcaccctcaccgtcagcgacgacacgctcttcaagaagatgctcaccgagggcgtcggcaagaagaaagcatatggcttcggcctcatgaccgtcgtccccctcgaggagagcagggccgaccccaagaagaagaggaaggtctag

SEQ ID NO: 169 - DNA, 1494 bp, Artificial
  nuclease enabled I-TevI:(G2S)3:cas6:NLS
atgggcaagagcggcatctaccagattaaaaacaccctcaacaacaaggtctacgtcggcagcgccaaggacttcgagaagaggtggaagaggcacttcaaggacctggagaaggtaagtttctgcttctacctttgatatatatataataattatcattaattagtagtaatataatatttcaaatatttttttcaaaataaaagaatgtagtatatagcaattgcttttctgtagtttataagtgtgtatattttaatttataacttttctaatatatgaccaaaacatggtgatgtgcagggctgccacagcagcattaaactccagcgcagcttcaacaagcacggcaacgtgttcgagtgcagcatcctggaggagatcccctatgaaaaagacctcatcatcgagcgcgagaacttctggattaaagagctcaacagcaaaattaacggctacaacatcgccgacgccaccttcggcgacacctgcagcacccaccccctaaaggaggagatcattaaaaagcgcagcgaaaccgtcaaggccaagatgctcaagctcggccccgacggccgcaaggccctctacagcaagcccggcagcaagaacgggaggtggaaccccgaaacccataaattctgcaagtgcggcgtccgcatccagaccagcgcctacacctgcagcaagtgccgcaaccgcagcggcgagaacaacagcttcttcaaccataaacacagcgacatcaccaagagcaagatcagcgagaagatgaaaggcaagaagcccagcaacggaggcagcgggggttctggtggctccatgtacatcagcagggtcgagatcgaccgatataataggcgcaaggtcagggacctcacccacgtcggcgcctaccacgcctgggtcgaggagagcttccccagcgagctcgagcaatcaatcaggaccaggaagctctggcgcatcgaccgcatccagggcaaggactacctcatcatcgtcagcaaggagaagcccaacctccagaagctcgaaaaatatggcgtcgtcggcagcgcccagaccaaggactaccagcacttcctcgacagcatcaagaccggcttcaggatgaacttcaggatcgtcctcaaccccgtcatcagcatcaccagccccgacaaatcaaaacgcggcgtcgtcaagccccacgtcaccattaaacaccagatggacttcctcgtcaagcagagcgaaaaaaacggcttcagcctcgtcggcgagagcttctccatcgtcgagaggggctacgaggtgttccagaagcccgagaagcccatcaggctcagcaaggtcgtctacgagggcaccctcaccgtcagcgacgacacgctcttcaagaagatgctcaccgagggcgtcggcaagaagaaagcatatggcttcggcctcatgaccgtcgtccccctcgaggagagcagggccgaccccaagaagaagaggaaggtctag

SEQ ID NO: 170 - DNA, 1515 bp, Artificial
  nuclease enabled I-TevI:XTEN:cas6:NLS
atgggcaagagcggcatctaccagattaaaaacaccctcaacaacaaggtctacgtcggcagcgccaaggacttcgagaagaggtggaagaggcacttcaaggacctggagaaggtaagtttctgcttctacctttgatatatatataataattatcattaattagtagtaatataatatttcaaatatttttttcaaaataaaagaatgtagtatatagcaattgcttttctgtagtttataagtgtgtatattttaatttataacttttctaatatatgaccaaaacatggtgatgtgcagggctgccacagcagcattaaactccagcgcagcttcaacaagcacggcaacgtgttcgagtgcagcatcctggaggagatcccctatgaaaaagacctcatcatcgagcgcgagaacttctggattaaagagctcaacagcaaaattaacggctacaacatcgccgacgccaccttcggcgacacctgcagcacccaccccctaaaggaggagatcattaaaaagcgcagcgaaaccgtcaaggccaagatgctcaagctcggccccgacggccgcaaggccctctacagcaagcccggcagcaagaacgggaggtggaaccccgaaacccataaattctgcaagtgcggcgtccgcatccagaccagcgcctacacctgcagcaagtgccgcaaccgcagcggcgagaacaacagcttcttcaaccataaacacagcgacatcaccaagagcaagatcagcgagaagatgaaaggcaagaagcccagcaactcaggctctgaaacgccaggcaccagcgagtccgcaacgcctgagtcgatgtacatcagcagggtcgagatcgaccgatataataggcgcaaggtcagggacctcacccacgtcggcgcctaccacgcctgggtcgaggagagcttccccagcgagctcgagcaatcaatcaggaccaggaagctctggcgcatcgaccgcatccagggcaaggactacctcatcatcgtcagcaaggagaagcccaacctccagaagctcgaaaaatatggcgtcgtcggcagcgcccagaccaaggactaccagcacttcctcgacagcatcaagaccggcttcaggatgaacttcaggatcgtcctcaaccccgtcatcagcatcaccagccccgacaaatcaaaacgcggcgtcgtcaagccccacgtcaccattaaacaccagatggacttcctcgtcaagcagagcgaaaaaaacggcttcagcctcgtcggcgagagcttctccatcgtcgagaggggctacgaggtgttccagaagcccgagaagcccatcaggctcagcaaggtcgtctacgagggcaccctcaccgtcagcgacgacacgctcttcaagaagatgctcaccgagggcgtcggcaagaagaaagcatatggcttcggcctcatgaccgtcgtccccctcgaggagagcagggccgaccccaagaagaagaggaaggtctag

SEQ ID NO: 171 - DNA, 2496 bp, Artificial
  nuclease enabled I-TevI:cse1:NLS
atgggcaagagcggcatctaccagattaaaaacaccctcaacaacaaggtctacgtcggcagcgccaaggacttcgagaagaggtggaagaggcacttcaaggacctggagaaggtaagtttctgcttctacctttgatatatatataataattatcattaattagtagtaatataatatttcaaatatttttttcaaaataaaagaatgtagtatatagcaattgcttttctgtagtttataagtgtgtatattttaatttataacttttctaatatatgaccaaaacatggtgatgtgcagggctgccacagcagcattaaactccagcgcagcttcaacaagcacggcaacgtgttcgagtgcagcatcctggaggagatcccctatgaaaaagacctcatcatcgagcgcgagaacttctggattaaagagctcaacagcaaaattaacggctacaacatcgccgacgccaccttcggcgacacctgcagcacccaccccctaaaggaggagatcattaaaaagcgcagcgaaaccgtcaaggccaagatgctcaagctcggccccgacggccgcaaggccctctacagcaagcccggcagcaagaacgggaggtggaaccccgaaacccataaattctgcaagtgcggcgtccgcatccagaccagcgcctacacctgcagcaagtgccgcaaccgcagcggcgagaacaacagcttcttcaaccataaacacagcgacatcaccaagagcaagatcagcgagaagatgaaaggcaagaagcccagcaacatgagccgcttcaacctcctcgacgagccctggatcagcgtcatctacgacgagaagggcagcaccaaggacgtcagcctccaggacctcttcaccaacgcccaccagtacaaggagctcgccggcgacaccaagacccaggacttcgccgtcctcagggtcctcctcgccgtcctccacaccgtgttcagccgcttcgacatcgacggcaacgcctacgagtacctcaccatcgacgagggctggaaccagctcgagcccgtcgacgagatggacatcgagaactacgaggaggccctctatgaaacatgggagaagctctggaccaataaaagattccccaacatcgtcaatcaatacctcgagaagtggagggaccgcttctacctcttcgaccagaagtaccccttcttccaggtcaccaaggaggacatcgccggcgataaaattagcaaggccaagggcaccagcatcctcggcaaaaatataaatcgcatcatcagcgagagcggcaacaagatcgccctcttcagccccaaggacgaggaaaataaaaatactctcaccgccgccgagctcgccaggtggctcatcaccttccagggctacagcggcgtcagcgacaaggtcatcttcggcaatgaaaaatatacccccagcaagggctggctcttcgacatcggcgccatctacattaaaggcaacaccctcttcgaaaccctcctcctcaactacatcagcccctacaacgagtgcggcaatgtggaaaatatacagaggccctgctgggagaggaagagcagcgacatcattaaaagctacctcgatgaaaaagacatcaccaacatcgccagcctctacaccgtctggagcaagggcatctacatcgaccccgacttcaacctcaataaacccttcagcttcgacatcgtcaagctccccgacatcaaccaccgcgacaacttcctcgagcccatgaccctctggaagtacaacgtcagcggcaaaaatagggacagctacacccccaagaagcacctcctcaaccagagcctctggaggagcttcggcctcctgagcataaaagacaccgacctccagcacaggaagcccggcgtcatcgagtggctcacctacatcgacgatataataggcaacaggctcagcaacatcgtcgccatcagcatgcaggacgacggcaacccccagagcaggctgcccaccgacgaggtcatcgacagcatcttcatcaacgacctcgtcctcaccgacctcgacgagggcggctgggtccccaggatcaacgaggtcgtcgaggaaaccaagaagatcatcagcaggacatataaaacgtacattaatgatataaaggagatccgcaacatcagcaacggcagctacacccagcagatcgtcgagagcctctacttcaagatcgaccagcccttcaggcagtggctcgccagcatccagcccgaggacgacaaggacagcaagatccaggagtggcgcgtcctcctcaagaaaatagtcaaggccgaggccgaggtcatcctccaccagggcggcgccagggactacctcggcatccagaaggacggccgaattaagaacatcgccaccgcctacaacagcttcgacttctggctccgccagcagttaaaaagcagggccgaccccaagaagaagaggaaggtctag

SEQ ID NO: 172 - DNA, 2505 bp, Artificial
  nuclease enabled I-TevI:GRA:cse1:NLS
atgggcaagagcggcatctaccagattaaaaacaccctcaacaacaaggtctacgtcggcagcgccaaggacttcgagaagaggtggaagaggcacttcaaggacctggagaaggtaagtttctgcttctacctttgatatatatataataattatcattaattagtagtaatataatatttcaaatatttttttcaaaataaaagaatgtagtatatagcaattgcttttctgtagtttataagtgtgtatattttaatttataacttttctaatatatgaccaaaacatggtgatgtgcagggctgccacagcagcattaaactccagcgcagcttcaacaagcacggcaacgtgttcgagtgcagcatcctggaggagatcccctatgaaaaagacctcatcatcgagcgcgagaacttctggattaaagagctcaacagcaaaattaacggctacaacatcgccgacgccaccttcggcgacacctgcagcacccaccccctaaaggaggagatcattaaaaagcgcagcgaaaccgtcaaggccaagatgctcaagctcggccccgacggccgcaaggccctctacagcaagcccggcagcaagaacgggaggtggaaccccgaaacccataaattctgcaagtgcggcgtccgcatccagaccagcgcctacacctgcagcaagtgccgcaaccgcagcggcgagaacaacagcttcttcaaccataaacacagcgacatcaccaagagcaagatcagcgagaagatgaaaggcaagaagcccagcaacggcagggctatgagccgcttcaacctcctcgacgagccctggatcagcgtcatctacgacgagaagggcagcaccaaggacgtcagcctccaggacctcttcaccaacgcccaccagtacaaggagctcgccggcgacaccaagacccaggacttcgccgtcctcagggtcctcctcgccgtcctccacaccgtgttcagccgcttcgacatcgacggcaacgcctacgagtacctcaccatcgacgagggctggaaccagctcgagcccgtcgacgagatggacatcgagaactacgaggaggccctctatgaaacatgggagaagctctggaccaataaaagattccccaacatcgtcaatcaatacctcgagaagtggagggaccgcttctacctcttcgaccagaagtaccccttcttccaggtcaccaaggaggacatcgccggcgataaaattagcaaggccaagggcaccagcatcctcggcaaaaatataaatcgcatcatcagcgagagcggcaacaagatcgccctcttcagccccaaggacgaggaaaataaaaatactctcaccgccgccgagctcgccaggtggctcatcaccttccagggctacagcggcgtcagcgacaaggtcatcttcggcaatgaaaaatatacccccagcaagggctggctcttcgacatcggcgccatctacattaaaggcaacaccctcttcgaaaccctcctcctcaactacatcagcccctacaacgagtgcggcaatgtggaaaatatacagaggccctgctgggagaggaagagcagcgacatcattaaaagctacctcgatgaaaaagacatcaccaacatcgccagcctctacaccgtctggagcaagggcatctacatcgaccccgacttcaacctcaataaacccttcagcttcgacatcgtcaagctccccgacatcaaccaccgcgacaacttcctcgagcccatgaccctctggaagtacaacgtcagcggcaaaaatagggacagctacacccccaagaagcacctcctcaaccagagcctctggaggagcttcggcctcctgagcataaaagacaccgacctccagcacaggaagcccggcgtcatcgagtggctcacctacatcgacgatataataggcaacaggctcagcaacatcgtcgccatcagcatgcaggacgacggcaacccccagagcaggctgcccaccgacgaggtcatcgacagcatcttcatcaacgacctcgtcctcaccgacctcgacgagggcggctgggtccccaggatcaacgaggtcgtcgaggaaaccaagaagatcatcagcaggacatataaaacgtacattaatgatataaaggagatccgcaacatcagcaacggcagctacacccagcagatcgtcgagagcctctacttcaagatcgaccagcccttcaggcagtggctcgccagcatccagcccgaggacgacaaggacagcaagatccaggagtggcgcgtcctcctcaagaaaatagtcaaggccgaggccgaggtcatcctccaccagggcggcgccagggactacctcggcatccagaaggacggccgaattaagaacatcgccaccgcctacaacagcttcgacttctggctccgccagcagttaaaaagcagggccgaccccaagaagaagaggaaggtctag

SEQ ID NO: 173 - DNA, 2523 bp, Artificial
  nuclease enabled I-TevI:(G2S)3:cse1:NLS
atgggcaagagcggcatctaccagattaaaaacaccctcaacaacaaggtctacgtcggcagcgccaaggacttcgagaagaggtggaagaggcacttcaaggacctggagaaggtaagtttctgcttctacctttgatatatatataataattatcattaattagtagtaatataatatttcaaatatttttttcaaaataaaagaatgtagtatatagcaattgcttttctgtagtttataagtgtgtatattttaatttataacttttctaatatatgaccaaaacatggtgatgtgcagggctgccacagcagcattaaactccagcgcagcttcaacaagcacggcaacgtgttcgagtgcagcatcctggaggagatcccctatgaaaaagacctcatcatcgagcgcgagaacttctggattaaagagctcaacagcaaaattaacggctacaacatcgccgacgccaccttcggcgacacctgcagcacccaccccctaaaggaggagatcattaaaaagcgcagcgaaaccgtcaaggccaagatgctcaagctcggccccgacggccgcaaggccctctacagcaagcccggcagcaagaacgggaggtggaaccccgaaacccataaattctgcaagtgcggcgtccgcatccagaccagcgcctacacctgcagcaagtgccgcaaccgcagcggcgagaacaacagcttcttcaaccataaacacagcgacatcaccaagagcaagatcagcgagaagatgaaaggcaagaagcccagcaacggaggcagcgggggttctggtggctccatgagccgcttcaacctcctcgacgagccctggatcagcgtcatctacgacgagaagggcagcaccaaggacgtcagcctccaggacctcttcaccaacgcccaccagtacaaggagctcgccggcgacaccaagacccaggacttcgccgtcctcagggtcctcctcgccgtcctccacaccgtgttcagccgcttcgacatcgacggcaacgcctacgagtacctcaccatcgacgagggctggaaccagctcgagcccgtcgacgagatggacatcgagaactacgaggaggccctctatgaaacatgggagaagctctggaccaataaaagattccccaacatcgtcaatcaatacctcgagaagtggagggaccgcttctacctcttcgaccagaagtaccccttcttccaggtcaccaaggaggacatcgccggcgataaaattagcaaggccaagggcaccagcatcctcggcaaaaatataaatcgcatcatcagcgagagcggcaacaagatcgccctcttcagccccaaggacgaggaaaataaaaatactctcaccgccgccgagctcgccaggtggctcatcaccttccagggctacagcggcgtcagcgacaaggtcatcttcggcaatgaaaaatatacccccagcaagggctggctcttcgacatcggcgccatctacattaaaggcaacaccctcttcgaaaccctcctcctcaactacatcagcccctacaacgagtgcggcaatgtggaaaatatacagaggccctgctgggagaggaagagcagcgacatcattaaaagctacctcgatgaaaaagacatcaccaacatcgccagcctctacaccgtctggagcaagggcatctacatcgaccccgacttcaacctcaataaacccttcagcttcgacatcgtcaagctccccgacatcaaccaccgcgacaacttcctcgagcccatgaccctctggaagtacaacgtcagcggcaaaaatagggacagctacacccccaagaagcacctcctcaaccagagcctctggaggagcttcggcctcctgagcataaaagacaccgacctccagcacaggaagcccggcgtcatcgagtggctcacctacatcgacgatataataggcaacaggctcagcaacatcgtcgccatcagcatgcaggacgacggcaacccccagagcaggctgcccaccgacgaggtcatcgacagcatcttcatcaacgacctcgtcctcaccgacctcgacgagggcggctgggtccccaggatcaacgaggtcgtcgaggaaaccaagaagatcatcagcaggacatataaaacgtacattaatgatataaaggagatccgcaacatcagcaacggcagctacacccagcagatcgtcgagagcctctacttcaagatcgaccagcccttcaggcagtggctcgccagcatccagcccgaggacgacaaggacagcaagatccaggagtggcgcgtcctcctcaagaaaatagtcaaggccgaggccgaggtcatcctccaccagggcggcgccagggactacctcggcatccagaaggacggccgaattaagaacatcgccaccgcctacaacagcttcgacttctggctccgccagcagttaaaaagcagggccgaccccaagaagaagaggaaggtctag

SEQ ID NO: 174 - DNA, 2544 bp, Artificial
  nuclease enabled I-TevI:XTEN:cse1:NLS
atgggcaagagcggcatctaccagattaaaaacaccctcaacaacaaggtctacgtcggcagcgccaaggacttcgagaagaggtggaagaggcacttcaaggacctggagaaggtaagtttctgcttctacctttgatatatatataataattatcattaattagtagtaatataatatttcaaatatttttttcaaaataaaagaatgtagtatatagcaattgcttttctgtagtttataagtgtgtatattttaatttataacttttctaatatatgaccaaaacatggtgatgtgcagggctgccacagcagcattaaactccagcgcagcttcaacaagcacggcaacgtgttcgagtgcagcatcctggaggagatcccctatgaaaaagacctcatcatcgagcgcgagaacttctggattaaagagctcaacagcaaaattaacggctacaacatcgccgacgccaccttcggcgacacctgcagcacccaccccctaaaggaggagatcattaaaaagcgcagcgaaaccgtcaaggccaagatgctcaagctcggccccgacggccgcaaggccctctacagcaagcccggcagcaagaacgggaggtggaaccccgaaacccataaattctgcaagtgcggcgtccgcatccagaccagcgcctacacctgcagcaagtgccgcaaccgcagcggcgagaacaacagcttcttcaaccataaacacagcgacatcaccaagagcaagatcagcgagaagatgaaaggcaagaagcccagcaactcaggctctgaaacgccaggcaccagcgagtccgcaacgcctgagtcgatgagccgcttcaacctcctcgacgagccctggatcagcgtcatctacgacgagaagggcagcaccaaggacgtcagcctccaggacctcttcaccaacgcccaccagtacaaggagctcgccggcgacaccaagacccaggacttcgccgtcctcagggtcctcctcgccgtcctccacaccgtgttcagccgcttcgacatcgacggcaacgcctacgagtacctcaccatcgacgagggctggaaccagctcgagcccgtcgacgagatggacatcgagaactacgaggaggccctctatgaaacatgggagaagctctggaccaataaaagattccccaacatcgtcaatcaatacctcgagaagtggagggaccgcttctacctcttcgaccagaagtaccccttcttccaggtcaccaaggaggacatcgccggcgataaaattagcaaggccaagggcaccagcatcctcggcaaaaatataaatcgcatcatcagcgagagcggcaacaagatcgccctcttcagccccaaggacgaggaaaataaaaatactctcaccgccgccgagctcgccaggtggctcatcaccttccagggctacagcggcgtcagcgacaaggtcatcttcggcaatgaaaaatatacccccagcaagggctggctcttcgacatcggcgccatctacattaaaggcaacaccctcttcgaaaccctcctcctcaactacatcagcccctacaacgagtgcggcaatgtggaaaatatacagaggccctgctgggagaggaagagcagcgacatcattaaaagctacctcgatgaaaaagacatcaccaacatcgccagcctctacaccgtctggagcaagggcatctacatcgaccccgacttcaacctcaataaacccttcagcttcgacatcgtcaagctccccgacatcaaccaccgcgacaacttcctcgagcccatgaccctctggaagtacaacgtcagcggcaaaaatagggacagctacacccccaagaagcacctcctcaaccagagcctctggaggagcttcggcctcctgagcataaaagacaccgacctccagcacaggaagcccggcgtcatcgagtggctcacctacatcgacgatataataggcaacaggctcagcaacatcgtcgccatcagcatgcaggacgacggcaacccccagagcaggctgcccaccgacgaggtcatcgacagcatcttcatcaacgacctcgtcctcaccgacctcgacgagggcggctgggtccccaggatcaacgaggtcgtcgaggaaaccaagaagatcatcagcaggacatataaaacgtacattaatgatataaaggagatccgcaacatcagcaacggcagctacacccagcagatcgtcgagagcctctacttcaagatcgaccagcccttcaggcagtggctcgccagcatccagcccgaggacgacaaggacagcaagatccaggagtggcgcgtcctcctcaagaaaatagtcaaggccgaggccgaggtcatcctccaccagggcggcgccagggactacctcggcatccagaaggacggccgaattaagaacatcgccaccgcctacaacagcttcgacttctggctccgccagcagttaaaaagcagggccgaccccaagaagaagaggaaggtctag

SEQ ID NO: 175 - protein, 425 aa, Artificial
  Protein of  nuclease enabled I-TevI:cas6:NLS
MGKSGIYQIKNTLNNKVYVGSAKDFEKRWKRHFKDLEKGCHSSIKLQRSFNKHGNVFECSILEEIPYEKDLIIERENFWIKELNSKINGYNIADATFGDTCSTHPLKEEIIKKRSETVKAKMLKLGPDGRKALYSKPGSKNGRWNPETHKFCKCGVRIQTSAYTCSKCRNRSGENNSFFNHKHSDITKSKISEKMKGKKPSNMYISRVEIDRYNRRKVRDLTHVGAYHAWVEESFPSELEQSIRTRKLWRIDRIQGKDYLIIVSKEKPNLQKLEKYGVVGSAQTKDYQHFLDSIKTGFRMNFRIVLNPVISITSPDKSKRGVVKPHVTIKHQMDFLVKQSEKNGFSLVGESFSIVERGYEVFQKPEKPIRLSKVVYEGTLTVSDDTLFKKMLTEGVGKKKAYGFGLMTVVPLEESRADPKKKRKV

SEQ ID NO: 176 - protein, 428 aa, Artificial
  Protein of  nuclease enabled I-TevI:GRA:cas6:NLS
MGKSGIYQIKNTLNNKVYVGSAKDFEKRWKRHFKDLEKGCHSSIKLQRSFNKHGNVFECSILEEIPYEKDLIIERENFWIKELNSKINGYNIADATFGDTCSTHPLKEEIIKKRSETVKAKMLKLGPDGRKALYSKPGSKNGRWNPETHKFCKCGVRIQTSAYTCSKCRNRSGENNSFFNHKHSDITKSKISEKMKGKKPSNGRAMYISRVEIDRYNRRKVRDLTHVGAYHAWVEESFPSELEQSIRTRKLWRIDRIQGKDYLIIVSKEKPNLQKLEKYGVVGSAQTKDYQHFLDSIKTGFRMNFRIVLNPVISITSPDKSKRGVVKPHVTIKHQMDFLVKQSEKNGFSLVGESFSIVERGYEVFQKPEKPIRLSKVVYEGTLTVSDDTLFKKMLTEGVGKKKAYGFGLMTVVPLEESRADPKKKRKV

SEQ ID NO: 177 - protein, 434 aa, Artificial
  Protein of  nuclease enabled I-TevI:(G2S)3:cas6:NLS
MGKSGIYQIKNTLNNKVYVGSAKDFEKRWKRHFKDLEKGCHSSIKLQRSFNKHGNVFECSILEEIPYEKDLIIERENFWIKELNSKINGYNIADATFGDTCSTHPLKEEIIKKRSETVKAKMLKLGPDGRKALYSKPGSKNGRWNPETHKFCKCGVRIQTSAYTCSKCRNRSGENNSFFNHKHSDITKSKISEKMKGKKPSNGGSGGSGGSMYISRVEIDRYNRRKVRDLTHVGAYHAWVEESFPSELEQSIRTRKLWRIDRIQGKDYLIIVSKEKPNLQKLEKYGVVGSAQTKDYQHFLDSIKTGFRMNFRIVLNPVISITSPDKSKRGVVKPHVTIKHQMDFLVKQSEKNGFSLVGESFSIVERGYEVFQKPEKPIRLSKVVYEGTLTVSDDTLFKKMLTEGVGKKKAYGFGLMTVVPLEESRADPKKKRKV

SEQ ID NO: 178 - protein, 441 aa, Artificial
  Protein of  nuclease enabled I-TevI:XTEN:cas6:NLS
MGKSGIYQIKNTLNNKVYVGSAKDFEKRWKRHFKDLEKGCHSSIKLQRSFNKHGNVFECSILEEIPYEKDLIIERENFWIKELNSKINGYNIADATFGDTCSTHPLKEEIIKKRSETVKAKMLKLGPDGRKALYSKPGSKNGRWNPETHKFCKCGVRIQTSAYTCSKCRNRSGENNSFFNHKHSDITKSKISEKMKGKKPSNSGSETPGTSESATPESMYISRVEIDRYNRRKVRDLTHVGAYHAWVEESFPSELEQSIRTRKLWRIDRIQGKDYLIIVSKEKPNLQKLEKYGVVGSAQTKDYQHFLDSIKTGFRMNFRIVLNPVISITSPDKSKRGVVKPHVTIKHQMDFLVKQSEKNGFSLVGESFSIVERGYEVFQKPEKPIRLSKVVYEGTLTVSDDTLFKKMLTEGVGKKKAYGFGLMTVVPLEESRADPKKKRKV

SEQ ID NO: 179 - protein, 768 aa, Artificial
  Protein of  nuclease enabled I-TevI:cse1:NLS
MGKSGIYQIKNTLNNKVYVGSAKDFEKRWKRHFKDLEKGCHSSIKLQRSFNKHGNVFECSILEEIPYEKDLIIERENFWIKELNSKINGYNIADATFGDTCSTHPLKEEIIKKRSETVKAKMLKLGPDGRKALYSKPGSKNGRWNPETHKFCKCGVRIQTSAYTCSKCRNRSGENNSFFNHKHSDITKSKISEKMKGKKPSNMSRFNLLDEPWISVIYDEKGSTKDVSLQDLFTNAHQYKELAGDTKTQDFAVLRVLLAVLHTVFSRFDIDGNAYEYLTIDEGWNQLEPVDEMDIENYEEALYETWEKLWTNKRFPNIVNQYLEKWRDRFYLFDQKYPFFQVTKEDIAGDKISKAKGTSILGKNINRIISESGNKIALFSPKDEENKNTLTAAELARWLITFQGYSGVSDKVIFGNEKYTPSKGWLFDIGAIYIKGNTLFETLLLNYISPYNECGNVENIQRPCWERKSSDIIKSYLDEKDITNIASLYTVWSKGIYIDPDFNLNKPFSFDIVKLPDINHRDNFLEPMTLWKYNVSGKNRDSYTPKKHLLNQSLWRSFGLLSIKDTDLQHRKPGVIEWLTYIDDIIGNRLSNIVAISMQDDGNPQSRLPTDEVIDSIFINDLVLTDLDEGGWVPRINEVVEETKKIISRTYKTYINDIKEIRNISNGSYTQQIVESLYFKIDQPFRQWLASIQPEDDKDSKIQEWRVLLKKIVKAEAEVILHQGGARDYLGIQKDGRIKNIATAYNSFDFWLRQQLKSRADPKKKRKV

SEQ ID NO: 180 - protein, 771 aa, Artificial
  Protein of  nuclease enabled I-TevI:GRA:cse1:NLS
MGKSGIYQIKNTLNNKVYVGSAKDFEKRWKRHFKDLEKGCHSSIKLQRSFNKHGNVFECSILEEIPYEKDLIIERENFWIKELNSKINGYNIADATFGDTCSTHPLKEEIIKKRSETVKAKMLKLGPDGRKALYSKPGSKNGRWNPETHKFCKCGVRIQTSAYTCSKCRNRSGENNSFFNHKHSDITKSKISEKMKGKKPSNGRAMSRFNLLDEPWISVIYDEKGSTKDVSLQDLFTNAHQYKELAGDTKTQDFAVLRVLLAVLHTVFSRFDIDGNAYEYLTIDEGWNQLEPVDEMDIENYEEALYETWEKLWTNKRFPNIVNQYLEKWRDRFYLFDQKYPFFQVTKEDIAGDKISKAKGTSILGKNINRIISESGNKIALFSPKDEENKNTLTAAELARWLITFQGYSGVSDKVIFGNEKYTPSKGWLFDIGAIYIKGNTLFETLLLNYISPYNECGNVENIQRPCWERKSSDIIKSYLDEKDITNIASLYTVWSKGIYIDPDFNLNKPFSFDIVKLPDINHRDNFLEPMTLWKYNVSGKNRDSYTPKKHLLNQSLWRSFGLLSIKDTDLQHRKPGVIEWLTYIDDIIGNRLSNIVAISMQDDGNPQSRLPTDEVIDSIFINDLVLTDLDEGGWVPRINEVVEETKKIISRTYKTYINDIKEIRNISNGSYTQQIVESLYFKIDQPFRQWLASIQPEDDKDSKIQEWRVLLKKIVKAEAEVILHQGGARDYLGIQKDGRIKNIATAYNSFDFWLRQQLKSRADPKKKRKV

SEQ ID NO: 181 - protein, 777 aa, Artificial
  Protein of  nuclease enabled I-TevI:(G2S)3:cse1:NLS
MGKSGIYQIKNTLNNKVYVGSAKDFEKRWKRHFKDLEKGCHSSIKLQRSFNKHGNVFECSILEEIPYEKDLIIERENFWIKELNSKINGYNIADATFGDTCSTHPLKEEIIKKRSETVKAKMLKLGPDGRKALYSKPGSKNGRWNPETHKFCKCGVRIQTSAYTCSKCRNRSGENNSFFNHKHSDITKSKISEKMKGKKPSNGGSGGSGGSMSRFNLLDEPWISVIYDEKGSTKDVSLQDLFTNAHQYKELAGDTKTQDFAVLRVLLAVLHTVFSRFDIDGNAYEYLTIDEGWNQLEPVDEMDIENYEEALYETWEKLWTNKRFPNIVNQYLEKWRDRFYLFDQKYPFFQVTKEDIAGDKISKAKGTSILGKNINRIISESGNKIALFSPKDEENKNTLTAAELARWLITFQGYSGVSDKVIFGNEKYTPSKGWLFDIGAIYIKGNTLFETLLLNYISPYNECGNVENIQRPCWERKSSDIIKSYLDEKDITNIASLYTVWSKGIYIDPDFNLNKPFSFDIVKLPDINHRDNFLEPMTLWKYNVSGKNRDSYTPKKHLLNQSLWRSFGLLSIKDTDLQHRKPGVIEWLTYIDDIIGNRLSNIVAISMQDDGNPQSRLPTDEVIDSIFINDLVLTDLDEGGWVPRINEVVEETKKIISRTYKTYINDIKEIRNISNGSYTQQIVESLYFKIDQPFRQWLASIQPEDDKDSKIQEWRVLLKKIVKAEAEVILHQGGARDYLGIQKDGRIKNIATAYNSFDFWLRQQLKSRADPKKKRKV

SEQ ID NO: 182 - protein, 784 aa, Artificial
  Protein of  nuclease enabled I-TevI:XTEN:cse1:NLS
MGKSGIYQIKNTLNNKVYVGSAKDFEKRWKRHFKDLEKGCHSSIKLQRSFNKHGNVFECSILEEIPYEKDLIIERENFWIKELNSKINGYNIADATFGDTCSTHPLKEEIIKKRSETVKAKMLKLGPDGRKALYSKPGSKNGRWNPETHKFCKCGVRIQTSAYTCSKCRNRSGENNSFFNHKHSDITKSKISEKMKGKKPSNSGSETPGTSESATPESMSRFNLLDEPWISVIYDEKGSTKDVSLQDLFTNAHQYKELAGDTKTQDFAVLRVLLAVLHTVFSRFDIDGNAYEYLTIDEGWNQLEPVDEMDIENYEEALYETWEKLWTNKRFPNIVNQYLEKWRDRFYLFDQKYPFFQVTKEDIAGDKISKAKGTSILGKNINRIISESGNKIALFSPKDEENKNTLTAAELARWLITFQGYSGVSDKVIFGNEKYTPSKGWLFDIGAIYIKGNTLFETLLLNYISPYNECGNVENIQRPCWERKSSDIIKSYLDEKDITNIASLYTVWSKGIYIDPDFNLNKPFSFDIVKLPDINHRDNFLEPMTLWKYNVSGKNRDSYTPKKHLLNQSLWRSFGLLSIKDTDLQHRKPGVIEWLTYIDDIIGNRLSNIVAISMQDDGNPQSRLPTDEVIDSIFINDLVLTDLDEGGWVPRINEVVEETKKIISRTYKTYINDIKEIRNISNGSYTQQIVESLYFKIDQPFRQWLASIQPEDDKDSKIQEWRVLLKKIVKAEAEVILHQGGARDYLGIQKDGRIKNIATAYNSFDFWLRQQLKSRADPKKKRKV

SEQ ID NO: 183 - DNA, 3801 bp, Artificial
  UBI  nuclease enabled I-TevI:cas6:NLS
gtgcagcgtgacccggtcgtgcccctctctagagataatgagcattgcatgtctaagttataaaaaattaccacatattttttttgtcacacttgtttgaagtgcagtttatctatctttatacatatatttaaactttactctacgaataatataatctatagtactacaataatatcagtgttttagagaatcatataaatgaacagttagacatggtctaaaggacaattgagtattttgacaacaggactctacagttttatctttttagtgtgcatgtgttctcctttttttttgcaaatagcttcacctatataatacttcatccattttattagtacatccatttagggtttagggttaatggtttttatagactaatttttttagtacatctattttattctattttagcctctaaattaagaaaactaaaactctattttagtttttttatttaataatttagatataaaatagaataaaataaagtgactaaaaattaaacaaataccctttaagaaattaaaaaaactaaggaaacatttttcttgtttcgagtagataatgccagcctgttaaacgccgtcgacgagtctaacggacaccaaccagcgaaccagcagcgtcgcgtcgggccaagcgaagcagacggcacggcatctctgtcgctgcctctggacccctctcgagagttccgctccaccgttggacttgctccgctgtcggcatccagaaattgcgtggcggagcggcagacgtgagccggcacggcaggcggcctcctcctcctctcacggcaccggcagctacgggggattcctttcccaccgctccttcgctttcccttcctcgcccgccgtaataaatagacaccccctccacaccctctttccccaacctcgtgttgttcggagcgcacacacacacaaccagatctcccccaaatccacccgtcggcacctccgcttcaaggtacgccgctcgtcctcccccccccccctctctaccttctctagatcggcgttccggtccatgcatggttagggcccggtagttctacttctgttcatgtttgtgttagatccgtgtttgtgttagatccgtgctgctagcgttcgtacacggatgcgacctgtacgtcagacacgttctgattgctaacttgccagtgtttctctttggggaatcctgggatggctctagccgttccgcagacgggatcgatttcatgattttttttgtttcgttgcatagggtttggtttgcccttttcctttatttcaatatatgccgtgcacttgtttgtcgggtcatcttttcatgcttttttttgtcttggttgtgatgatgtggtctggttgggcggtcgttctagatcggagtagaattctgtttcaaactacctggtggatttattaattttggatctgtatgtgtgtgccatacatattcatagttacgaattgaagatgatggatggaaatatcgatctaggataggtatacatgttgatgcgggttttactgatgcatatacagagatgctttttgttcgcttggttgtgatgatgtggtgtggttgggcggtcgttcattcgttctagatcggagtagaatactgtttcaaactacctggtgtatttattaattttggaactgtatgtgtgtgtcatacatcttcatagttacgagtttaagatggatggaaatatcgatctaggataggtatacatgttgatgtgggttttactgatgcatatacatgatggcatatgcagcatctattcatatgctctaaccttgagtacctatctattataataaacaagtatgttttataattattttgatcttgatatacttggatgatggcatatgcagcagctatatgtggatttttttagccctgccttcatacgctatttatttgcttggtactgtttcttttgtcgatgctcaccctgttgtttggtgttacttctgcaggtcgactctagaggatccatgggcaagagcggcatctaccagattaaaaacaccctcaacaacaaggtctacgtcggcagcgccaaggacttcgagaagaggtggaagaggcacttcaaggacctggagaaggtaagtttctgcttctacctttgatatatatataataattatcattaattagtagtaatataatatttcaaatatttttttcaaaataaaagaatgtagtatatagcaattgcttttctgtagtttataagtgtgtatattttaatttataacttttctaatatatgaccaaaacatggtgatgtgcagggctgccacagcagcattaaactccagcgcagcttcaacaagcacggcaacgtgttcgagtgcagcatcctggaggagatcccctatgaaaaagacctcatcatcgagcgcgagaacttctggattaaagagctcaacagcaaaattaacggctacaacatcgccgacgccaccttcggcgacacctgcagcacccaccccctaaaggaggagatcattaaaaagcgcagcgaaaccgtcaaggccaagatgctcaagctcggccccgacggccgcaaggccctctacagcaagcccggcagcaagaacgggaggtggaaccccgaaacccataaattctgcaagtgcggcgtccgcatccagaccagcgcctacacctgcagcaagtgccgcaaccgcagcggcgagaacaacagcttcttcaaccataaacacagcgacatcaccaagagcaagatcagcgagaagatgaaaggcaagaagcccagcaacatgtacatcagcagggtcgagatcgaccgatataataggcgcaaggtcagggacctcacccacgtcggcgcctaccacgcctgggtcgaggagagcttccccagcgagctcgagcaatcaatcaggaccaggaagctctggcgcatcgaccgcatccagggcaaggactacctcatcatcgtcagcaaggagaagcccaacctccagaagctcgaaaaatatggcgtcgtcggcagcgcccagaccaaggactaccagcacttcctcgacagcatcaagaccggcttcaggatgaacttcaggatcgtcctcaaccccgtcatcagcatcaccagccccgacaaatcaaaacgcggcgtcgtcaagccccacgtcaccattaaacaccagatggacttcctcgtcaagcagagcgaaaaaaacggcttcagcctcgtcggcgagagcttctccatcgtcgagaggggctacgaggtgttccagaagcccgagaagcccatcaggctcagcaaggtcgtctacgagggcaccctcaccgtcagcgacgacacgctcttcaagaagatgctcaccgagggcgtcggcaagaagaaagcatatggcttcggcctcatgaccgtcgtccccctcgaggagagcagggccgaccccaagaagaagaggaaggtctagtcttcgtaagttaacctagacttgtccatcttctggattggccaacttaattaatgtatgaaataaaaggatgcacacatagtgacatgctaatcactataatgtgggcatcaaagttgtgtgttatgtgtaattactagttatctgaataaaagagaaagagatcatccatatttcttatcctaaatgaatgtcacgtgtctttataattctttgatgaaccagatgcatttcattaaccaaatccatatacatataaatattaatcatatataattaatatcaattgggttagcaaaacaaatctagtctaggtgtgttttgc

SEQ ID NO: 184 - DNA, 3810 bp, Artificial
  UBI  nuclease enabled I-TevI:GRA:cas6:NLS
gtgcagcgtgacccggtcgtgcccctctctagagataatgagcattgcatgtctaagttataaaaaattaccacatattttttttgtcacacttgtttgaagtgcagtttatctatctttatacatatatttaaactttactctacgaataatataatctatagtactacaataatatcagtgttttagagaatcatataaatgaacagttagacatggtctaaaggacaattgagtattttgacaacaggactctacagttttatctttttagtgtgcatgtgttctcctttttttttgcaaatagcttcacctatataatacttcatccattttattagtacatccatttagggtttagggttaatggtttttatagactaatttttttagtacatctattttattctattttagcctctaaattaagaaaactaaaactctattttagtttttttatttaataatttagatataaaatagaataaaataaagtgactaaaaattaaacaaataccctttaagaaattaaaaaaactaaggaaacatttttcttgtttcgagtagataatgccagcctgttaaacgccgtcgacgagtctaacggacaccaaccagcgaaccagcagcgtcgcgtcgggccaagcgaagcagacggcacggcatctctgtcgctgcctctggacccctctcgagagttccgctccaccgttggacttgctccgctgtcggcatccagaaattgcgtggcggagcggcagacgtgagccggcacggcaggcggcctcctcctcctctcacggcaccggcagctacgggggattcctttcccaccgctccttcgctttcccttcctcgcccgccgtaataaatagacaccccctccacaccctctttccccaacctcgtgttgttcggagcgcacacacacacaaccagatctcccccaaatccacccgtcggcacctccgcttcaaggtacgccgctcgtcctcccccccccccctctctaccttctctagatcggcgttccggtccatgcatggttagggcccggtagttctacttctgttcatgtttgtgttagatccgtgtttgtgttagatccgtgctgctagcgttcgtacacggatgcgacctgtacgtcagacacgttctgattgctaacttgccagtgtttctctttggggaatcctgggatggctctagccgttccgcagacgggatcgatttcatgattttttttgtttcgttgcatagggtttggtttgcccttttcctttatttcaatatatgccgtgcacttgtttgtcgggtcatcttttcatgcttttttttgtcttggttgtgatgatgtggtctggttgggcggtcgttctagatcggagtagaattctgtttcaaactacctggtggatttattaattttggatctgtatgtgtgtgccatacatattcatagttacgaattgaagatgatggatggaaatatcgatctaggataggtatacatgttgatgcgggttttactgatgcatatacagagatgctttttgttcgcttggttgtgatgatgtggtgtggttgggcggtcgttcattcgttctagatcggagtagaatactgtttcaaactacctggtgtatttattaattttggaactgtatgtgtgtgtcatacatcttcatagttacgagtttaagatggatggaaatatcgatctaggataggtatacatgttgatgtgggttttactgatgcatatacatgatggcatatgcagcatctattcatatgctctaaccttgagtacctatctattataataaacaagtatgttttataattattttgatcttgatatacttggatgatggcatatgcagcagctatatgtggatttttttagccctgccttcatacgctatttatttgcttggtactgtttcttttgtcgatgctcaccctgttgtttggtgttacttctgcaggtcgactctagaggatccatgggcaagagcggcatctaccagattaaaaacaccctcaacaacaaggtctacgtcggcagcgccaaggacttcgagaagaggtggaagaggcacttcaaggacctggagaaggtaagtttctgcttctacctttgatatatatataataattatcattaattagtagtaatataatatttcaaatatttttttcaaaataaaagaatgtagtatatagcaattgcttttctgtagtttataagtgtgtatattttaatttataacttttctaatatatgaccaaaacatggtgatgtgcagggctgccacagcagcattaaactccagcgcagcttcaacaagcacggcaacgtgttcgagtgcagcatcctggaggagatcccctatgaaaaagacctcatcatcgagcgcgagaacttctggattaaagagctcaacagcaaaattaacggctacaacatcgccgacgccaccttcggcgacacctgcagcacccaccccctaaaggaggagatcattaaaaagcgcagcgaaaccgtcaaggccaagatgctcaagctcggccccgacggccgcaaggccctctacagcaagcccggcagcaagaacgggaggtggaaccccgaaacccataaattctgcaagtgcggcgtccgcatccagaccagcgcctacacctgcagcaagtgccgcaaccgcagcggcgagaacaacagcttcttcaaccataaacacagcgacatcaccaagagcaagatcagcgagaagatgaaaggcaagaagcccagcaacggcagggctatgtacatcagcagggtcgagatcgaccgatataataggcgcaaggtcagggacctcacccacgtcggcgcctaccacgcctgggtcgaggagagcttccccagcgagctcgagcaatcaatcaggaccaggaagctctggcgcatcgaccgcatccagggcaaggactacctcatcatcgtcagcaaggagaagcccaacctccagaagctcgaaaaatatggcgtcgtcggcagcgcccagaccaaggactaccagcacttcctcgacagcatcaagaccggcttcaggatgaacttcaggatcgtcctcaaccccgtcatcagcatcaccagccccgacaaatcaaaacgcggcgtcgtcaagccccacgtcaccattaaacaccagatggacttcctcgtcaagcagagcgaaaaaaacggcttcagcctcgtcggcgagagcttctccatcgtcgagaggggctacgaggtgttccagaagcccgagaagcccatcaggctcagcaaggtcgtctacgagggcaccctcaccgtcagcgacgacacgctcttcaagaagatgctcaccgagggcgtcggcaagaagaaagcatatggcttcggcctcatgaccgtcgtccccctcgaggagagcagggccgaccccaagaagaagaggaaggtctagtcttcgtaagttaacctagacttgtccatcttctggattggccaacttaattaatgtatgaaataaaaggatgcacacatagtgacatgctaatcactataatgtgggcatcaaagttgtgtgttatgtgtaattactagttatctgaataaaagagaaagagatcatccatatttcttatcctaaatgaatgtcacgtgtctttataattctttgatgaaccagatgcatttcattaaccaaatccatatacatataaatattaatcatatataattaatatcaattgggttagcaaaacaaatctagtctaggtgtgttttgc

SEQ ID NO: 185 - DNA, 3828 bp, Artificial
  UBI  nuclease enabled I-TevI:(G2S)3:cas6:NLS
gtgcagcgtgacccggtcgtgcccctctctagagataatgagcattgcatgtctaagttataaaaaattaccacatattttttttgtcacacttgtttgaagtgcagtttatctatctttatacatatatttaaactttactctacgaataatataatctatagtactacaataatatcagtgttttagagaatcatataaatgaacagttagacatggtctaaaggacaattgagtattttgacaacaggactctacagttttatctttttagtgtgcatgtgttctcctttttttttgcaaatagcttcacctatataatacttcatccattttattagtacatccatttagggtttagggttaatggtttttatagactaatttttttagtacatctattttattctattttagcctctaaattaagaaaactaaaactctattttagtttttttatttaataatttagatataaaatagaataaaataaagtgactaaaaattaaacaaataccctttaagaaattaaaaaaactaaggaaacatttttcttgtttcgagtagataatgccagcctgttaaacgccgtcgacgagtctaacggacaccaaccagcgaaccagcagcgtcgcgtcgggccaagcgaagcagacggcacggcatctctgtcgctgcctctggacccctctcgagagttccgctccaccgttggacttgctccgctgtcggcatccagaaattgcgtggcggagcggcagacgtgagccggcacggcaggcggcctcctcctcctctcacggcaccggcagctacgggggattcctttcccaccgctccttcgctttcccttcctcgcccgccgtaataaatagacaccccctccacaccctctttccccaacctcgtgttgttcggagcgcacacacacacaaccagatctcccccaaatccacccgtcggcacctccgcttcaaggtacgccgctcgtcctcccccccccccctctctaccttctctagatcggcgttccggtccatgcatggttagggcccggtagttctacttctgttcatgtttgtgttagatccgtgtttgtgttagatccgtgctgctagcgttcgtacacggatgcgacctgtacgtcagacacgttctgattgctaacttgccagtgtttctctttggggaatcctgggatggctctagccgttccgcagacgggatcgatttcatgattttttttgtttcgttgcatagggtttggtttgcccttttcctttatttcaatatatgccgtgcacttgtttgtcgggtcatcttttcatgcttttttttgtcttggttgtgatgatgtggtctggttgggcggtcgttctagatcggagtagaattctgtttcaaactacctggtggatttattaattttggatctgtatgtgtgtgccatacatattcatagttacgaattgaagatgatggatggaaatatcgatctaggataggtatacatgttgatgcgggttttactgatgcatatacagagatgctttttgttcgcttggttgtgatgatgtggtgtggttgggcggtcgttcattcgttctagatcggagtagaatactgtttcaaactacctggtgtatttattaattttggaactgtatgtgtgtgtcatacatcttcatagttacgagtttaagatggatggaaatatcgatctaggataggtatacatgttgatgtgggttttactgatgcatatacatgatggcatatgcagcatctattcatatgctctaaccttgagtacctatctattataataaacaagtatgttttataattattttgatcttgatatacttggatgatggcatatgcagcagctatatgtggatttttttagccctgccttcatacgctatttatttgcttggtactgtttcttttgtcgatgctcaccctgttgtttggtgttacttctgcaggtcgactctagaggatccatgggcaagagcggcatctaccagattaaaaacaccctcaacaacaaggtctacgtcggcagcgccaaggacttcgagaagaggtggaagaggcacttcaaggacctggagaaggtaagtttctgcttctacctttgatatatatataataattatcattaattagtagtaatataatatttcaaatatttttttcaaaataaaagaatgtagtatatagcaattgcttttctgtagtttataagtgtgtatattttaatttataacttttctaatatatgaccaaaacatggtgatgtgcagggctgccacagcagcattaaactccagcgcagcttcaacaagcacggcaacgtgttcgagtgcagcatcctggaggagatcccctatgaaaaagacctcatcatcgagcgcgagaacttctggattaaagagctcaacagcaaaattaacggctacaacatcgccgacgccaccttcggcgacacctgcagcacccaccccctaaaggaggagatcattaaaaagcgcagcgaaaccgtcaaggccaagatgctcaagctcggccccgacggccgcaaggccctctacagcaagcccggcagcaagaacgggaggtggaaccccgaaacccataaattctgcaagtgcggcgtccgcatccagaccagcgcctacacctgcagcaagtgccgcaaccgcagcggcgagaacaacagcttcttcaaccataaacacagcgacatcaccaagagcaagatcagcgagaagatgaaaggcaagaagcccagcaacggaggcagcgggggttctggtggctccatgtacatcagcagggtcgagatcgaccgatataataggcgcaaggtcagggacctcacccacgtcggcgcctaccacgcctgggtcgaggagagcttccccagcgagctcgagcaatcaatcaggaccaggaagctctggcgcatcgaccgcatccagggcaaggactacctcatcatcgtcagcaaggagaagcccaacctccagaagctcgaaaaatatggcgtcgtcggcagcgcccagaccaaggactaccagcacttcctcgacagcatcaagaccggcttcaggatgaacttcaggatcgtcctcaaccccgtcatcagcatcaccagccccgacaaatcaaaacgcggcgtcgtcaagccccacgtcaccattaaacaccagatggacttcctcgtcaagcagagcgaaaaaaacggcttcagcctcgtcggcgagagcttctccatcgtcgagaggggctacgaggtgttccagaagcccgagaagcccatcaggctcagcaaggtcgtctacgagggcaccctcaccgtcagcgacgacacgctcttcaagaagatgctcaccgagggcgtcggcaagaagaaagcatatggcttcggcctcatgaccgtcgtccccctcgaggagagcagggccgaccccaagaagaagaggaaggtctagtcttcgtaagttaacctagacttgtccatcttctggattggccaacttaattaatgtatgaaataaaaggatgcacacatagtgacatgctaatcactataatgtgggcatcaaagttgtgtgttatgtgtaattactagttatctgaataaaagagaaagagatcatccatatttcttatcctaaatgaatgtcacgtgtctttataattctttgatgaaccagatgcatttcattaaccaaatccatatacatataaatattaatcatatataattaatatcaattgggttagcaaaacaaatctagtctaggtgtgttttgc

SEQ ID NO: 186 - DNA, 3849 bp, Artificial
  UBI  nuclease enabled I-TevI:XTEN:cas6:NLS
gtgcagcgtgacccggtcgtgcccctctctagagataatgagcattgcatgtctaagttataaaaaattaccacatattttttttgtcacacttgtttgaagtgcagtttatctatctttatacatatatttaaactttactctacgaataatataatctatagtactacaataatatcagtgttttagagaatcatataaatgaacagttagacatggtctaaaggacaattgagtattttgacaacaggactctacagttttatctttttagtgtgcatgtgttctcctttttttttgcaaatagcttcacctatataatacttcatccattttattagtacatccatttagggtttagggttaatggtttttatagactaatttttttagtacatctattttattctattttagcctctaaattaagaaaactaaaactctattttagtttttttatttaataatttagatataaaatagaataaaataaagtgactaaaaattaaacaaataccctttaagaaattaaaaaaactaaggaaacatttttcttgtttcgagtagataatgccagcctgttaaacgccgtcgacgagtctaacggacaccaaccagcgaaccagcagcgtcgcgtcgggccaagcgaagcagacggcacggcatctctgtcgctgcctctggacccctctcgagagttccgctccaccgttggacttgctccgctgtcggcatccagaaattgcgtggcggagcggcagacgtgagccggcacggcaggcggcctcctcctcctctcacggcaccggcagctacgggggattcctttcccaccgctccttcgctttcccttcctcgcccgccgtaataaatagacaccccctccacaccctctttccccaacctcgtgttgttcggagcgcacacacacacaaccagatctcccccaaatccacccgtcggcacctccgcttcaaggtacgccgctcgtcctcccccccccccctctctaccttctctagatcggcgttccggtccatgcatggttagggcccggtagttctacttctgttcatgtttgtgttagatccgtgtttgtgttagatccgtgctgctagcgttcgtacacggatgcgacctgtacgtcagacacgttctgattgctaacttgccagtgtttctctttggggaatcctgggatggctctagccgttccgcagacgggatcgatttcatgattttttttgtttcgttgcatagggtttggtttgcccttttcctttatttcaatatatgccgtgcacttgtttgtcgggtcatcttttcatgcttttttttgtcttggttgtgatgatgtggtctggttgggcggtcgttctagatcggagtagaattctgtttcaaactacctggtggatttattaattttggatctgtatgtgtgtgccatacatattcatagttacgaattgaagatgatggatggaaatatcgatctaggataggtatacatgttgatgcgggttttactgatgcatatacagagatgctttttgttcgcttggttgtgatgatgtggtgtggttgggcggtcgttcattcgttctagatcggagtagaatactgtttcaaactacctggtgtatttattaattttggaactgtatgtgtgtgtcatacatcttcatagttacgagtttaagatggatggaaatatcgatctaggataggtatacatgttgatgtgggttttactgatgcatatacatgatggcatatgcagcatctattcatatgctctaaccttgagtacctatctattataataaacaagtatgttttataattattttgatcttgatatacttggatgatggcatatgcagcagctatatgtggatttttttagccctgccttcatacgctatttatttgcttggtactgtttcttttgtcgatgctcaccctgttgtttggtgttacttctgcaggtcgactctagaggatccatgggcaagagcggcatctaccagattaaaaacaccctcaacaacaaggtctacgtcggcagcgccaaggacttcgagaagaggtggaagaggcacttcaaggacctggagaaggtaagtttctgcttctacctttgatatatatataataattatcattaattagtagtaatataatatttcaaatatttttttcaaaataaaagaatgtagtatatagcaattgcttttctgtagtttataagtgtgtatattttaatttataacttttctaatatatgaccaaaacatggtgatgtgcagggctgccacagcagcattaaactccagcgcagcttcaacaagcacggcaacgtgttcgagtgcagcatcctggaggagatcccctatgaaaaagacctcatcatcgagcgcgagaacttctggattaaagagctcaacagcaaaattaacggctacaacatcgccgacgccaccttcggcgacacctgcagcacccaccccctaaaggaggagatcattaaaaagcgcagcgaaaccgtcaaggccaagatgctcaagctcggccccgacggccgcaaggccctctacagcaagcccggcagcaagaacgggaggtggaaccccgaaacccataaattctgcaagtgcggcgtccgcatccagaccagcgcctacacctgcagcaagtgccgcaaccgcagcggcgagaacaacagcttcttcaaccataaacacagcgacatcaccaagagcaagatcagcgagaagatgaaaggcaagaagcccagcaactcaggctctgaaacgccaggcaccagcgagtccgcaacgcctgagtcgatgtacatcagcagggtcgagatcgaccgatataataggcgcaaggtcagggacctcacccacgtcggcgcctaccacgcctgggtcgaggagagcttccccagcgagctcgagcaatcaatcaggaccaggaagctctggcgcatcgaccgcatccagggcaaggactacctcatcatcgtcagcaaggagaagcccaacctccagaagctcgaaaaatatggcgtcgtcggcagcgcccagaccaaggactaccagcacttcctcgacagcatcaagaccggcttcaggatgaacttcaggatcgtcctcaaccccgtcatcagcatcaccagccccgacaaatcaaaacgcggcgtcgtcaagccccacgtcaccattaaacaccagatggacttcctcgtcaagcagagcgaaaaaaacggcttcagcctcgtcggcgagagcttctccatcgtcgagaggggctacgaggtgttccagaagcccgagaagcccatcaggctcagcaaggtcgtctacgagggcaccctcaccgtcagcgacgacacgctcttcaagaagatgctcaccgagggcgtcggcaagaagaaagcatatggcttcggcctcatgaccgtcgtccccctcgaggagagcagggccgaccccaagaagaagaggaaggtctagtcttcgtaagttaacctagacttgtccatcttctggattggccaacttaattaatgtatgaaataaaaggatgcacacatagtgacatgctaatcactataatgtgggcatcaaagttgtgtgttatgtgtaattactagttatctgaataaaagagaaagagatcatccatatttcttatcctaaatgaatgtcacgtgtctttataattctttgatgaaccagatgcatttcattaaccaaatccatatacatataaatattaatcatatataattaatatcaattgggttagcaaaacaaatctagtctaggtgtgttttgc

SEQ ID NO: 187 - DNA, 4830 bp, Artificial
  UBI  nuclease enabled I-TevI:cse1:NLS
gtgcagcgtgacccggtcgtgcccctctctagagataatgagcattgcatgtctaagttataaaaaattaccacatattttttttgtcacacttgtttgaagtgcagtttatctatctttatacatatatttaaactttactctacgaataatataatctatagtactacaataatatcagtgttttagagaatcatataaatgaacagttagacatggtctaaaggacaattgagtattttgacaacaggactctacagttttatctttttagtgtgcatgtgttctcctttttttttgcaaatagcttcacctatataatacttcatccattttattagtacatccatttagggtttagggttaatggtttttatagactaatttttttagtacatctattttattctattttagcctctaaattaagaaaactaaaactctattttagtttttttatttaataatttagatataaaatagaataaaataaagtgactaaaaattaaacaaataccctttaagaaattaaaaaaactaaggaaacatttttcttgtttcgagtagataatgccagcctgttaaacgccgtcgacgagtctaacggacaccaaccagcgaaccagcagcgtcgcgtcgggccaagcgaagcagacggcacggcatctctgtcgctgcctctggacccctctcgagagttccgctccaccgttggacttgctccgctgtcggcatccagaaattgcgtggcggagcggcagacgtgagccggcacggcaggcggcctcctcctcctctcacggcaccggcagctacgggggattcctttcccaccgctccttcgctttcccttcctcgcccgccgtaataaatagacaccccctccacaccctctttccccaacctcgtgttgttcggagcgcacacacacacaaccagatctcccccaaatccacccgtcggcacctccgcttcaaggtacgccgctcgtcctcccccccccccctctctaccttctctagatcggcgttccggtccatgcatggttagggcccggtagttctacttctgttcatgtttgtgttagatccgtgtttgtgttagatccgtgctgctagcgttcgtacacggatgcgacctgtacgtcagacacgttctgattgctaacttgccagtgtttctctttggggaatcctgggatggctctagccgttccgcagacgggatcgatttcatgattttttttgtttcgttgcatagggtttggtttgcccttttcctttatttcaatatatgccgtgcacttgtttgtcgggtcatcttttcatgcttttttttgtcttggttgtgatgatgtggtctggttgggcggtcgttctagatcggagtagaattctgtttcaaactacctggtggatttattaattttggatctgtatgtgtgtgccatacatattcatagttacgaattgaagatgatggatggaaatatcgatctaggataggtatacatgttgatgcgggttttactgatgcatatacagagatgctttttgttcgcttggttgtgatgatgtggtgtggttgggcggtcgttcattcgttctagatcggagtagaatactgtttcaaactacctggtgtatttattaattttggaactgtatgtgtgtgtcatacatcttcatagttacgagtttaagatggatggaaatatcgatctaggataggtatacatgttgatgtgggttttactgatgcatatacatgatggcatatgcagcatctattcatatgctctaaccttgagtacctatctattataataaacaagtatgttttataattattttgatcttgatatacttggatgatggcatatgcagcagctatatgtggatttttttagccctgccttcatacgctatttatttgcttggtactgtttcttttgtcgatgctcaccctgttgtttggtgttacttctgcaggtcgactctagaggatccatgggcaagagcggcatctaccagattaaaaacaccctcaacaacaaggtctacgtcggcagcgccaaggacttcgagaagaggtggaagaggcacttcaaggacctggagaaggtaagtttctgcttctacctttgatatatatataataattatcattaattagtagtaatataatatttcaaatatttttttcaaaataaaagaatgtagtatatagcaattgcttttctgtagtttataagtgtgtatattttaatttataacttttctaatatatgaccaaaacatggtgatgtgcagggctgccacagcagcattaaactccagcgcagcttcaacaagcacggcaacgtgttcgagtgcagcatcctggaggagatcccctatgaaaaagacctcatcatcgagcgcgagaacttctggattaaagagctcaacagcaaaattaacggctacaacatcgccgacgccaccttcggcgacacctgcagcacccaccccctaaaggaggagatcattaaaaagcgcagcgaaaccgtcaaggccaagatgctcaagctcggccccgacggccgcaaggccctctacagcaagcccggcagcaagaacgggaggtggaaccccgaaacccataaattctgcaagtgcggcgtccgcatccagaccagcgcctacacctgcagcaagtgccgcaaccgcagcggcgagaacaacagcttcttcaaccataaacacagcgacatcaccaagagcaagatcagcgagaagatgaaaggcaagaagcccagcaacatgagccgcttcaacctcctcgacgagccctggatcagcgtcatctacgacgagaagggcagcaccaaggacgtcagcctccaggacctcttcaccaacgcccaccagtacaaggagctcgccggcgacaccaagacccaggacttcgccgtcctcagggtcctcctcgccgtcctccacaccgtgttcagccgcttcgacatcgacggcaacgcctacgagtacctcaccatcgacgagggctggaaccagctcgagcccgtcgacgagatggacatcgagaactacgaggaggccctctatgaaacatgggagaagctctggaccaataaaagattccccaacatcgtcaatcaatacctcgagaagtggagggaccgcttctacctcttcgaccagaagtaccccttcttccaggtcaccaaggaggacatcgccggcgataaaattagcaaggccaagggcaccagcatcctcggcaaaaatataaatcgcatcatcagcgagagcggcaacaagatcgccctcttcagccccaaggacgaggaaaataaaaatactctcaccgccgccgagctcgccaggtggctcatcaccttccagggctacagcggcgtcagcgacaaggtcatcttcggcaatgaaaaatatacccccagcaagggctggctcttcgacatcggcgccatctacattaaaggcaacaccctcttcgaaaccctcctcctcaactacatcagcccctacaacgagtgcggcaatgtggaaaatatacagaggccctgctgggagaggaagagcagcgacatcattaaaagctacctcgatgaaaaagacatcaccaacatcgccagcctctacaccgtctggagcaagggcatctacatcgaccccgacttcaacctcaataaacccttcagcttcgacatcgtcaagctccccgacatcaaccaccgcgacaacttcctcgagcccatgaccctctggaagtacaacgtcagcggcaaaaatagggacagctacacccccaagaagcacctcctcaaccagagcctctggaggagcttcggcctcctgagcataaaagacaccgacctccagcacaggaagcccggcgtcatcgagtggctcacctacatcgacgatataataggcaacaggctcagcaacatcgtcgccatcagcatgcaggacgacggcaacccccagagcaggctgcccaccgacgaggtcatcgacagcatcttcatcaacgacctcgtcctcaccgacctcgacgagggcggctgggtccccaggatcaacgaggtcgtcgaggaaaccaagaagatcatcagcaggacatataaaacgtacattaatgatataaaggagatccgcaacatcagcaacggcagctacacccagcagatcgtcgagagcctctacttcaagatcgaccagcccttcaggcagtggctcgccagcatccagcccgaggacgacaaggacagcaagatccaggagtggcgcgtcctcctcaagaaaatagtcaaggccgaggccgaggtcatcctccaccagggcggcgccagggactacctcggcatccagaaggacggccgaattaagaacatcgccaccgcctacaacagcttcgacttctggctccgccagcagttaaaaagcagggccgaccccaagaagaagaggaaggtctagtcttcgtaagttaacctagacttgtccatcttctggattggccaacttaattaatgtatgaaataaaaggatgcacacatagtgacatgctaatcactataatgtgggcatcaaagttgtgtgttatgtgtaattactagttatctgaataaaagagaaagagatcatccatatttcttatcctaaatgaatgtcacgtgtctttataattctttgatgaaccagatgcatttcattaaccaaatccatatacatataaatattaatcatatataattaatatcaattgggttagcaaaacaaatctagtctaggtgtgttttgc

SEQ ID NO: 188 - DNA, 4839 bp, Artificial
  UBI  nuclease enabled I-TevI:GRA:cse1:NLS
gtgcagcgtgacccggtcgtgcccctctctagagataatgagcattgcatgtctaagttataaaaaattaccacatattttttttgtcacacttgtttgaagtgcagtttatctatctttatacatatatttaaactttactctacgaataatataatctatagtactacaataatatcagtgttttagagaatcatataaatgaacagttagacatggtctaaaggacaattgagtattttgacaacaggactctacagttttatctttttagtgtgcatgtgttctcctttttttttgcaaatagcttcacctatataatacttcatccattttattagtacatccatttagggtttagggttaatggtttttatagactaatttttttagtacatctattttattctattttagcctctaaattaagaaaactaaaactctattttagtttttttatttaataatttagatataaaatagaataaaataaagtgactaaaaattaaacaaataccctttaagaaattaaaaaaactaaggaaacatttttcttgtttcgagtagataatgccagcctgttaaacgccgtcgacgagtctaacggacaccaaccagcgaaccagcagcgtcgcgtcgggccaagcgaagcagacggcacggcatctctgtcgctgcctctggacccctctcgagagttccgctccaccgttggacttgctccgctgtcggcatccagaaattgcgtggcggagcggcagacgtgagccggcacggcaggcggcctcctcctcctctcacggcaccggcagctacgggggattcctttcccaccgctccttcgctttcccttcctcgcccgccgtaataaatagacaccccctccacaccctctttccccaacctcgtgttgttcggagcgcacacacacacaaccagatctcccccaaatccacccgtcggcacctccgcttcaaggtacgccgctcgtcctcccccccccccctctctaccttctctagatcggcgttccggtccatgcatggttagggcccggtagttctacttctgttcatgtttgtgttagatccgtgtttgtgttagatccgtgctgctagcgttcgtacacggatgcgacctgtacgtcagacacgttctgattgctaacttgccagtgtttctctttggggaatcctgggatggctctagccgttccgcagacgggatcgatttcatgattttttttgtttcgttgcatagggtttggtttgcccttttcctttatttcaatatatgccgtgcacttgtttgtcgggtcatcttttcatgcttttttttgtcttggttgtgatgatgtggtctggttgggcggtcgttctagatcggagtagaattctgtttcaaactacctggtggatttattaattttggatctgtatgtgtgtgccatacatattcatagttacgaattgaagatgatggatggaaatatcgatctaggataggtatacatgttgatgcgggttttactgatgcatatacagagatgctttttgttcgcttggttgtgatgatgtggtgtggttgggcggtcgttcattcgttctagatcggagtagaatactgtttcaaactacctggtgtatttattaattttggaactgtatgtgtgtgtcatacatcttcatagttacgagtttaagatggatggaaatatcgatctaggataggtatacatgttgatgtgggttttactgatgcatatacatgatggcatatgcagcatctattcatatgctctaaccttgagtacctatctattataataaacaagtatgttttataattattttgatcttgatatacttggatgatggcatatgcagcagctatatgtggatttttttagccctgccttcatacgctatttatttgcttggtactgtttcttttgtcgatgctcaccctgttgtttggtgttacttctgcaggtcgactctagaggatccatgggcaagagcggcatctaccagattaaaaacaccctcaacaacaaggtctacgtcggcagcgccaaggacttcgagaagaggtggaagaggcacttcaaggacctggagaaggtaagtttctgcttctacctttgatatatatataataattatcattaattagtagtaatataatatttcaaatatttttttcaaaataaaagaatgtagtatatagcaattgcttttctgtagtttataagtgtgtatattttaatttataacttttctaatatatgaccaaaacatggtgatgtgcagggctgccacagcagcattaaactccagcgcagcttcaacaagcacggcaacgtgttcgagtgcagcatcctggaggagatcccctatgaaaaagacctcatcatcgagcgcgagaacttctggattaaagagctcaacagcaaaattaacggctacaacatcgccgacgccaccttcggcgacacctgcagcacccaccccctaaaggaggagatcattaaaaagcgcagcgaaaccgtcaaggccaagatgctcaagctcggccccgacggccgcaaggccctctacagcaagcccggcagcaagaacgggaggtggaaccccgaaacccataaattctgcaagtgcggcgtccgcatccagaccagcgcctacacctgcagcaagtgccgcaaccgcagcggcgagaacaacagcttcttcaaccataaacacagcgacatcaccaagagcaagatcagcgagaagatgaaaggcaagaagcccagcaacggcagggctatgagccgcttcaacctcctcgacgagccctggatcagcgtcatctacgacgagaagggcagcaccaaggacgtcagcctccaggacctcttcaccaacgcccaccagtacaaggagctcgccggcgacaccaagacccaggacttcgccgtcctcagggtcctcctcgccgtcctccacaccgtgttcagccgcttcgacatcgacggcaacgcctacgagtacctcaccatcgacgagggctggaaccagctcgagcccgtcgacgagatggacatcgagaactacgaggaggccctctatgaaacatgggagaagctctggaccaataaaagattccccaacatcgtcaatcaatacctcgagaagtggagggaccgcttctacctcttcgaccagaagtaccccttcttccaggtcaccaaggaggacatcgccggcgataaaattagcaaggccaagggcaccagcatcctcggcaaaaatataaatcgcatcatcagcgagagcggcaacaagatcgccctcttcagccccaaggacgaggaaaataaaaatactctcaccgccgccgagctcgccaggtggctcatcaccttccagggctacagcggcgtcagcgacaaggtcatcttcggcaatgaaaaatatacccccagcaagggctggctcttcgacatcggcgccatctacattaaaggcaacaccctcttcgaaaccctcctcctcaactacatcagcccctacaacgagtgcggcaatgtggaaaatatacagaggccctgctgggagaggaagagcagcgacatcattaaaagctacctcgatgaaaaagacatcaccaacatcgccagcctctacaccgtctggagcaagggcatctacatcgaccccgacttcaacctcaataaacccttcagcttcgacatcgtcaagctccccgacatcaaccaccgcgacaacttcctcgagcccatgaccctctggaagtacaacgtcagcggcaaaaatagggacagctacacccccaagaagcacctcctcaaccagagcctctggaggagcttcggcctcctgagcataaaagacaccgacctccagcacaggaagcccggcgtcatcgagtggctcacctacatcgacgatataataggcaacaggctcagcaacatcgtcgccatcagcatgcaggacgacggcaacccccagagcaggctgcccaccgacgaggtcatcgacagcatcttcatcaacgacctcgtcctcaccgacctcgacgagggcggctgggtccccaggatcaacgaggtcgtcgaggaaaccaagaagatcatcagcaggacatataaaacgtacattaatgatataaaggagatccgcaacatcagcaacggcagctacacccagcagatcgtcgagagcctctacttcaagatcgaccagcccttcaggcagtggctcgccagcatccagcccgaggacgacaaggacagcaagatccaggagtggcgcgtcctcctcaagaaaatagtcaaggccgaggccgaggtcatcctccaccagggcggcgccagggactacctcggcatccagaaggacggccgaattaagaacatcgccaccgcctacaacagcttcgacttctggctccgccagcagttaaaaagcagggccgaccccaagaagaagaggaaggtctagtcttcgtaagttaacctagacttgtccatcttctggattggccaacttaattaatgtatgaaataaaaggatgcacacatagtgacatgctaatcactataatgtgggcatcaaagttgtgtgttatgtgtaattactagttatctgaataaaagagaaagagatcatccatatttcttatcctaaatgaatgtcacgtgtctttataattctttgatgaaccagatgcatttcattaaccaaatccatatacatataaatattaatcatatataattaatatcaattgggttagcaaaacaaatctagtctaggtgtgttttgc

SEQ ID NO: 189 - DNA, 4857 bp, Artificial
  UBI  nuclease enabled I-TevI:(G2S)3:cse1:NLS
gtgcagcgtgacccggtcgtgcccctctctagagataatgagcattgcatgtctaagttataaaaaattaccacatattttttttgtcacacttgtttgaagtgcagtttatctatctttatacatatatttaaactttactctacgaataatataatctatagtactacaataatatcagtgttttagagaatcatataaatgaacagttagacatggtctaaaggacaattgagtattttgacaacaggactctacagttttatctttttagtgtgcatgtgttctcctttttttttgcaaatagcttcacctatataatacttcatccattttattagtacatccatttagggtttagggttaatggtttttatagactaatttttttagtacatctattttattctattttagcctctaaattaagaaaactaaaactctattttagtttttttatttaataatttagatataaaatagaataaaataaagtgactaaaaattaaacaaataccctttaagaaattaaaaaaactaaggaaacatttttcttgtttcgagtagataatgccagcctgttaaacgccgtcgacgagtctaacggacaccaaccagcgaaccagcagcgtcgcgtcgggccaagcgaagcagacggcacggcatctctgtcgctgcctctggacccctctcgagagttccgctccaccgttggacttgctccgctgtcggcatccagaaattgcgtggcggagcggcagacgtgagccggcacggcaggcggcctcctcctcctctcacggcaccggcagctacgggggattcctttcccaccgctccttcgctttcccttcctcgcccgccgtaataaatagacaccccctccacaccctctttccccaacctcgtgttgttcggagcgcacacacacacaaccagatctcccccaaatccacccgtcggcacctccgcttcaaggtacgccgctcgtcctcccccccccccctctctaccttctctagatcggcgttccggtccatgcatggttagggcccggtagttctacttctgttcatgtttgtgttagatccgtgtttgtgttagatccgtgctgctagcgttcgtacacggatgcgacctgtacgtcagacacgttctgattgctaacttgccagtgtttctctttggggaatcctgggatggctctagccgttccgcagacgggatcgatttcatgattttttttgtttcgttgcatagggtttggtttgcccttttcctttatttcaatatatgccgtgcacttgtttgtcgggtcatcttttcatgcttttttttgtcttggttgtgatgatgtggtctggttgggcggtcgttctagatcggagtagaattctgtttcaaactacctggtggatttattaattttggatctgtatgtgtgtgccatacatattcatagttacgaattgaagatgatggatggaaatatcgatctaggataggtatacatgttgatgcgggttttactgatgcatatacagagatgctttttgttcgcttggttgtgatgatgtggtgtggttgggcggtcgttcattcgttctagatcggagtagaatactgtttcaaactacctggtgtatttattaattttggaactgtatgtgtgtgtcatacatcttcatagttacgagtttaagatggatggaaatatcgatctaggataggtatacatgttgatgtgggttttactgatgcatatacatgatggcatatgcagcatctattcatatgctctaaccttgagtacctatctattataataaacaagtatgttttataattattttgatcttgatatacttggatgatggcatatgcagcagctatatgtggatttttttagccctgccttcatacgctatttatttgcttggtactgtttcttttgtcgatgctcaccctgttgtttggtgttacttctgcaggtcgactctagaggatccatgggcaagagcggcatctaccagattaaaaacaccctcaacaacaaggtctacgtcggcagcgccaaggacttcgagaagaggtggaagaggcacttcaaggacctggagaaggtaagtttctgcttctacctttgatatatatataataattatcattaattagtagtaatataatatttcaaatatttttttcaaaataaaagaatgtagtatatagcaattgcttttctgtagtttataagtgtgtatattttaatttataacttttctaatatatgaccaaaacatggtgatgtgcagggctgccacagcagcattaaactccagcgcagcttcaacaagcacggcaacgtgttcgagtgcagcatcctggaggagatcccctatgaaaaagacctcatcatcgagcgcgagaacttctggattaaagagctcaacagcaaaattaacggctacaacatcgccgacgccaccttcggcgacacctgcagcacccaccccctaaaggaggagatcattaaaaagcgcagcgaaaccgtcaaggccaagatgctcaagctcggccccgacggccgcaaggccctctacagcaagcccggcagcaagaacgggaggtggaaccccgaaacccataaattctgcaagtgcggcgtccgcatccagaccagcgcctacacctgcagcaagtgccgcaaccgcagcggcgagaacaacagcttcttcaaccataaacacagcgacatcaccaagagcaagatcagcgagaagatgaaaggcaagaagcccagcaacggaggcagcgggggttctggtggctccatgagccgcttcaacctcctcgacgagccctggatcagcgtcatctacgacgagaagggcagcaccaaggacgtcagcctccaggacctcttcaccaacgcccaccagtacaaggagctcgccggcgacaccaagacccaggacttcgccgtcctcagggtcctcctcgccgtcctccacaccgtgttcagccgcttcgacatcgacggcaacgcctacgagtacctcaccatcgacgagggctggaaccagctcgagcccgtcgacgagatggacatcgagaactacgaggaggccctctatgaaacatgggagaagctctggaccaataaaagattccccaacatcgtcaatcaatacctcgagaagtggagggaccgcttctacctcttcgaccagaagtaccccttcttccaggtcaccaaggaggacatcgccggcgataaaattagcaaggccaagggcaccagcatcctcggcaaaaatataaatcgcatcatcagcgagagcggcaacaagatcgccctcttcagccccaaggacgaggaaaataaaaatactctcaccgccgccgagctcgccaggtggctcatcaccttccagggctacagcggcgtcagcgacaaggtcatcttcggcaatgaaaaatatacccccagcaagggctggctcttcgacatcggcgccatctacattaaaggcaacaccctcttcgaaaccctcctcctcaactacatcagcccctacaacgagtgcggcaatgtggaaaatatacagaggccctgctgggagaggaagagcagcgacatcattaaaagctacctcgatgaaaaagacatcaccaacatcgccagcctctacaccgtctggagcaagggcatctacatcgaccccgacttcaacctcaataaacccttcagcttcgacatcgtcaagctccccgacatcaaccaccgcgacaacttcctcgagcccatgaccctctggaagtacaacgtcagcggcaaaaatagggacagctacacccccaagaagcacctcctcaaccagagcctctggaggagcttcggcctcctgagcataaaagacaccgacctccagcacaggaagcccggcgtcatcgagtggctcacctacatcgacgatataataggcaacaggctcagcaacatcgtcgccatcagcatgcaggacgacggcaacccccagagcaggctgcccaccgacgaggtcatcgacagcatcttcatcaacgacctcgtcctcaccgacctcgacgagggcggctgggtccccaggatcaacgaggtcgtcgaggaaaccaagaagatcatcagcaggacatataaaacgtacattaatgatataaaggagatccgcaacatcagcaacggcagctacacccagcagatcgtcgagagcctctacttcaagatcgaccagcccttcaggcagtggctcgccagcatccagcccgaggacgacaaggacagcaagatccaggagtggcgcgtcctcctcaagaaaatagtcaaggccgaggccgaggtcatcctccaccagggcggcgccagggactacctcggcatccagaaggacggccgaattaagaacatcgccaccgcctacaacagcttcgacttctggctccgccagcagttaaaaagcagggccgaccccaagaagaagaggaaggtctagtcttcgtaagttaacctagacttgtccatcttctggattggccaacttaattaatgtatgaaataaaaggatgcacacatagtgacatgctaatcactataatgtgggcatcaaagttgtgtgttatgtgtaattactagttatctgaataaaagagaaagagatcatccatatttcttatcctaaatgaatgtcacgtgtctttataattctttgatgaaccagatgcatttcattaaccaaatccatatacatataaatattaatcatatataattaatatcaattgggttagcaaaacaaatctagtctaggtgtgttttgc

SEQ ID NO: 190 - DNA, 4878 bp, Artificial
  UBI  nuclease enabled I-TevI:XTEN:cse1:NLS
gtgcagcgtgacccggtcgtgcccctctctagagataatgagcattgcatgtctaagttataaaaaattaccacatattttttttgtcacacttgtttgaagtgcagtttatctatctttatacatatatttaaactttactctacgaataatataatctatagtactacaataatatcagtgttttagagaatcatataaatgaacagttagacatggtctaaaggacaattgagtattttgacaacaggactctacagttttatctttttagtgtgcatgtgttctcctttttttttgcaaatagcttcacctatataatacttcatccattttattagtacatccatttagggtttagggttaatggtttttatagactaatttttttagtacatctattttattctattttagcctctaaattaagaaaactaaaactctattttagtttttttatttaataatttagatataaaatagaataaaataaagtgactaaaaattaaacaaataccctttaagaaattaaaaaaactaaggaaacatttttcttgtttcgagtagataatgccagcctgttaaacgccgtcgacgagtctaacggacaccaaccagcgaaccagcagcgtcgcgtcgggccaagcgaagcagacggcacggcatctctgtcgctgcctctggacccctctcgagagttccgctccaccgttggacttgctccgctgtcggcatccagaaattgcgtggcggagcggcagacgtgagccggcacggcaggcggcctcctcctcctctcacggcaccggcagctacgggggattcctttcccaccgctccttcgctttcccttcctcgcccgccgtaataaatagacaccccctccacaccctctttccccaacctcgtgttgttcggagcgcacacacacacaaccagatctcccccaaatccacccgtcggcacctccgcttcaaggtacgccgctcgtcctcccccccccccctctctaccttctctagatcggcgttccggtccatgcatggttagggcccggtagttctacttctgttcatgtttgtgttagatccgtgtttgtgttagatccgtgctgctagcgttcgtacacggatgcgacctgtacgtcagacacgttctgattgctaacttgccagtgtttctctttggggaatcctgggatggctctagccgttccgcagacgggatcgatttcatgattttttttgtttcgttgcatagggtttggtttgcccttttcctttatttcaatatatgccgtgcacttgtttgtcgggtcatcttttcatgcttttttttgtcttggttgtgatgatgtggtctggttgggcggtcgttctagatcggagtagaattctgtttcaaactacctggtggatttattaattttggatctgtatgtgtgtgccatacatattcatagttacgaattgaagatgatggatggaaatatcgatctaggataggtatacatgttgatgcgggttttactgatgcatatacagagatgctttttgttcgcttggttgtgatgatgtggtgtggttgggcggtcgttcattcgttctagatcggagtagaatactgtttcaaactacctggtgtatttattaattttggaactgtatgtgtgtgtcatacatcttcatagttacgagtttaagatggatggaaatatcgatctaggataggtatacatgttgatgtgggttttactgatgcatatacatgatggcatatgcagcatctattcatatgctctaaccttgagtacctatctattataataaacaagtatgttttataattattttgatcttgatatacttggatgatggcatatgcagcagctatatgtggatttttttagccctgccttcatacgctatttatttgcttggtactgtttcttttgtcgatgctcaccctgttgtttggtgttacttctgcaggtcgactctagaggatccatgggcaagagcggcatctaccagattaaaaacaccctcaacaacaaggtctacgtcggcagcgccaaggacttcgagaagaggtggaagaggcacttcaaggacctggagaaggtaagtttctgcttctacctttgatatatatataataattatcattaattagtagtaatataatatttcaaatatttttttcaaaataaaagaatgtagtatatagcaattgcttttctgtagtttataagtgtgtatattttaatttataacttttctaatatatgaccaaaacatggtgatgtgcagggctgccacagcagcattaaactccagcgcagcttcaacaagcacggcaacgtgttcgagtgcagcatcctggaggagatcccctatgaaaaagacctcatcatcgagcgcgagaacttctggattaaagagctcaacagcaaaattaacggctacaacatcgccgacgccaccttcggcgacacctgcagcacccaccccctaaaggaggagatcattaaaaagcgcagcgaaaccgtcaaggccaagatgctcaagctcggccccgacggccgcaaggccctctacagcaagcccggcagcaagaacgggaggtggaaccccgaaacccataaattctgcaagtgcggcgtccgcatccagaccagcgcctacacctgcagcaagtgccgcaaccgcagcggcgagaacaacagcttcttcaaccataaacacagcgacatcaccaagagcaagatcagcgagaagatgaaaggcaagaagcccagcaactcaggctctgaaacgccaggcaccagcgagtccgcaacgcctgagtcgatgagccgcttcaacctcctcgacgagccctggatcagcgtcatctacgacgagaagggcagcaccaaggacgtcagcctccaggacctcttcaccaacgcccaccagtacaaggagctcgccggcgacaccaagacccaggacttcgccgtcctcagggtcctcctcgccgtcctccacaccgtgttcagccgcttcgacatcgacggcaacgcctacgagtacctcaccatcgacgagggctggaaccagctcgagcccgtcgacgagatggacatcgagaactacgaggaggccctctatgaaacatgggagaagctctggaccaataaaagattccccaacatcgtcaatcaatacctcgagaagtggagggaccgcttctacctcttcgaccagaagtaccccttcttccaggtcaccaaggaggacatcgccggcgataaaattagcaaggccaagggcaccagcatcctcggcaaaaatataaatcgcatcatcagcgagagcggcaacaagatcgccctcttcagccccaaggacgaggaaaataaaaatactctcaccgccgccgagctcgccaggtggctcatcaccttccagggctacagcggcgtcagcgacaaggtcatcttcggcaatgaaaaatatacccccagcaagggctggctcttcgacatcggcgccatctacattaaaggcaacaccctcttcgaaaccctcctcctcaactacatcagcccctacaacgagtgcggcaatgtggaaaatatacagaggccctgctgggagaggaagagcagcgacatcattaaaagctacctcgatgaaaaagacatcaccaacatcgccagcctctacaccgtctggagcaagggcatctacatcgaccccgacttcaacctcaataaacccttcagcttcgacatcgtcaagctccccgacatcaaccaccgcgacaacttcctcgagcccatgaccctctggaagtacaacgtcagcggcaaaaatagggacagctacacccccaagaagcacctcctcaaccagagcctctggaggagcttcggcctcctgagcataaaagacaccgacctccagcacaggaagcccggcgtcatcgagtggctcacctacatcgacgatataataggcaacaggctcagcaacatcgtcgccatcagcatgcaggacgacggcaacccccagagcaggctgcccaccgacgaggtcatcgacagcatcttcatcaacgacctcgtcctcaccgacctcgacgagggcggctgggtccccaggatcaacgaggtcgtcgaggaaaccaagaagatcatcagcaggacatataaaacgtacattaatgatataaaggagatccgcaacatcagcaacggcagctacacccagcagatcgtcgagagcctctacttcaagatcgaccagcccttcaggcagtggctcgccagcatccagcccgaggacgacaaggacagcaagatccaggagtggcgcgtcctcctcaagaaaatagtcaaggccgaggccgaggtcatcctccaccagggcggcgccagggactacctcggcatccagaaggacggccgaattaagaacatcgccaccgcctacaacagcttcgacttctggctccgccagcagttaaaaagcagggccgaccccaagaagaagaggaaggtctagtcttcgtaagttaacctagacttgtccatcttctggattggccaacttaattaatgtatgaaataaaaggatgcacacatagtgacatgctaatcactataatgtgggcatcaaagttgtgtgttatgtgtaattactagttatctgaataaaagagaaagagatcatccatatttcttatcctaaatgaatgtcacgtgtctttataattctttgatgaaccagatgcatttcattaaccaaatccatatacatataaatattaatcatatataattaatatcaattgggttagcaaaacaaatctagtctaggtgtgttttgc

SEQ ID NO: 191 - DNA, 33 bp, Artificial
  Immunofluorescent cascade target sequence
tatacctatatcaatggcctcccacgcataagc

SEQ ID NO: 192 - DNA, 1462 bp, Zea mays
ggctggtatcgataaatgtttccacatagattttgcatatcataatgatgtttgtcgttccgtatctatgtttcatacaaaatttttacgcatatcgcaacacatgggcacatacctagtgactgtataactctgcatgtatgagtgtatgactatatgatgtagtaactaataagaagggtagacatttgagtgattcttttattcctggacttgtaagacttgacatttctgccttgagtgcgatacatcatatggacaggggttatgcatacactgcttgtttgttgtttatgttctaagagcatctccaacaacgtgacatatgaaaatgccctacaatttaaaaatggttatattttataaaatttagggcataaataaaacatcccgctccaacattaaagccttaaatctattatagggaagcccactatgatatagtatatttgaggcactttagagggtgccctataattttttgaccatttttttatgaaatgagacactattggagtattttttttccgtagagcaccatatttcaatttgagacaccaatttaaggcattgttggagatgttctaaatgttggtttattttgtctgtatcgttgtggttttgatagtggtgcctttgcaatgtacatcttacattgacaataataataggtaaaactctacaaattttttatctaatggactcttgtatgaaacattgtacttgcacacatctgatgtaaacactgcatacttttaacagtgacaagattctgtttcattttagggctagtttgggaaccaaattttattagggtttttattttctaagaaaaagtaatttattttaccttgagaaaatataaattacttgagaaaatagagttccaaactagctcttatctttgtcgaatcctcctctattcaaatgtgacatttctggcacgtgacaactggtgatgttgtagactgtgttaagtaatacgtgtcattattactaaatgccattttagtaaatgttgagtatgtactctactacagtaagtattattggtgtatttacactagacagttggcggcctggcgggtaaagttatcctgtagaaagttgggccaggccaaaaccaaccgccaaaggaaaggccttccggcccgcccacctttgcgcgccgaaggtcagttccttcagtctcctcccgcttcagactctgaccacgtcgacaatccgggccgaaacacatctgcaccgtccacttgcgacagattgaacacaccacttctatccacgtcagcgatccgtggcactagcccttccaccaatcagcccaagttgcccctttcctttaaattcgccgcacccattgctcttctcacggccatagaaatcgaccgagcgaatccctcgcatcgcattcgcagcctttgctgcatcacaccaccgcgaaaccccagcagccgcatct

SEQ ID NO: 193 - DNA, 317 bp, Solanum tuberosum
agacttgtccatcttctggattggccaacttaattaatgtatgaaataaaaggatgcacacatagtgacatgctaatcactataatgtgggcatcaaagttgtgtgttatgtgtaattactagttatctgaataaaagagaaagagatcatccatatttcttatcctaaatgaatgtcacgtgtctttataattctttgatgaaccagatgcatttcattaaccaaatccatatacatataaatattaatcatatataattaatatcaattgggttagcaaaacaaatctagtctaggtgtgttttgcgaatgcggc

SEQ ID NO: 194 - DNA, 81 bp, Artificial
  targeting sequence
ctcactcactcatatctgtgctgtaccaacgctcactagatgttttaatatacctatatcaatggcctcccacgcataagc

SEQ ID NO: 195 - DNA, 82 bp, Artificial
  Mutation
ctcactcactcatatctgtgctgtaccagacgctcactagatgttttaatatacctatatcaatggcctcccacgcataagc

SEQ ID NO: 196 - DNA, 83 bp, Artificial
  Mutation
ctcactcactcatatctgtgctgtaccaatacgctcactagatgttttaatatacctatatcaatggcctcccacgcataagc

SEQ ID NO: 197 - DNA, 82 bp, Artificial
  Mutation
ctcactcactcatatctgtgctgtaccaaacgctcactagatgttttaatatacctatatcaatggcctcccacgcataagc

SEQ ID NO: 198 - DNA, 95 bp, Artificial
  Mutation
ctcactcactcatatgtggctagcaaggacggctccttcttgacgctcactagatgttttaatatacctatatcaatggcctcccacgcataagc

SEQ ID NO: 199 - DNA, 75 bp, Artificial
  Mutation
ctcactcactcatatctgcaggacgctcactagatgttttaatatacctatatcaatggcctcccacgcataagc

SEQ ID NO: 200 - DNA, 54 bp, Artificial
  Mutation
ctcactcactcatatctgtgctgtacctatatcaatggcctcccacgcataagc

SEQ ID NO: 201 - DNA, 72 bp, Artificial
  Mutation
ctcactcactcatatctgcctgtaccaaagatgttttaatatacctatatcaatggcctcccacgcataagc

SEQ ID NO: 202 - DNA, 63 bp, Artificial
  Mutation
ctcactcactcatatctgtgctgtaccaactatacctatatcaatggcctcccacgcataagc

SEQ ID NO: 203 - DNA, 79 bp, Artificial
  Mutation
ctcactcactcatatctgtgctgtaccaactcactagatgttttaatatacctatatcaatggcctcccacgcataagc

SEQ ID NO: 204 - DNA, 37 bp, Artificial
  Mutation
ctcactcactcatatcaatggcctcccacgcataagc

SEQ ID NO: 205 - DNA, 83 bp, Artificial
  targeting sequence
ctcactcactcatatctgtgctgtaccaacgctcactagatgttttctaatatacctatatcaatggcctcccacgcataagc

SEQ ID NO: 206 - DNA, 82 bp, Artificial
  Mutation
ctcactcactcatatctgtgctgtaccacgctcactagatgttttctaatatacctatatcaatggcctcccacgcataagc

SEQ ID NO: 207 - DNA, 91 bp, Artificial
  Mutation
ctcactcactcatatctagtgctgtacccaacttagtcgctcactagatgttttctaatatacctatatcaatggcctcccacgcataagc

SEQ ID NO: 208 - DNA, 99 bp, Artificial
  Mutation
ctcactcactcatatccatttagggtttagggttaattgtaatacgactcactagatgttttctaatatacctatatcaatggcctcccacgcataagc

SEQ ID NO: 209 - DNA, 78 bp, Artificial
  Mutation
ctcactcactcatatctgtgctgtagctcactagatgttttctaatatacctatatcaatggcctcccacgcataagc

SEQ ID NO: 210 - DNA, 81 bp, Artificial
  Mutation
ctcactcactcatatctgtgctgtaccaactcactagatgttttctaatatacctatatcaatggcctcccacgcataagc

SEQ ID NO: 211 - DNA, 85 bp, Artificial
  Mutation
ctcactcactcatatctgtgctgtaccaactggctcactagatgttttctaatatacctatatcaatggcctcccacgcataagc

SEQ ID NO: 212 - DNA, 81 bp, Artificial
  Mutation
ctcactcactcatatctgtgctgtaccagctcactagatgttttctaatatacctatatcaatggcctcccacgcataagc

SEQ ID NO: 213 - DNA, 54 bp, Artificial
  Mutation
ctcactcactcatatctgtgctgtaccaatatcaatggcctcccacgcataagc

SEQ ID NO: 214 - DNA, 62 bp, Artificial
  Mutation
ctcactcactcatatctgtgctgtaccaatatacctatatcaatggcctcccacgcataagc

SEQ ID NO: 215 - DNA, 65 bp, Artificial
  Mutation
ctcactcactcatatctgtggatgttttctaatatacctatatcaatggcctcccacgcataagc

SEQ ID NO: 216 - DNA, 85 bp, Artificial
  targeting sequence
ctcactcactcatatctgtgctgtaccaacgctcactagatgttttctaatatacctatatcaatggcctcccacgcataagctt

SEQ ID NO: 217 - DNA, 83 bp, Artificial
  Mutation
ctcactcactcatatctgtgctgtaccaactcactagatgttttctaatatacctatatcaatggcctcccacgcataagctt

SEQ ID NO: 218 - DNA, 79 bp, Artificial
  Mutation
ctcactcactcatatctgtgctgtaccaactagatgttttctaatatacctatatcaatggcctcccacgcataagctt

SEQ ID NO: 219 - DNA, 81 bp, Artificial
  Mutation
ctcactcactcatatctgtgctgtaccaacactagatgttttctaatatacctatatcaatggcctcccacgcataagctt

SEQ ID NO: 220 - DNA, 86 bp, Artificial
  Mutation
ctcactcactcatatctgtgctgtaccaaacgctcactagatgttttctaatatacctatatcaatggcctcccacgcataagctt

SEQ ID NO: 221 - DNA, 61 bp, Artificial
  Mutation
ctcactcactcatatctgtgctgtaccatacctatatcaatggcctcccacgcataagctt

SEQ ID NO: 222 - DNA, 80 bp, Artificial
  Mutation
ctcactcactcatatctgtgctgtacctcactagatgttttctaatatacctatatcaatggcctcccacgcataagctt

SEQ ID NO: 223 - DNA, 84 bp, Artificial
  Mutation
ctcactcactcatatctgtgctgtaccacgctcactagatgttttctaatatacctatatcaatggcctcccacgcataagctt

SEQ ID NO: 224 - DNA, 64 bp, Artificial
  Mutation
ctcactcactcatatctgtgctgtaccaacatacctatatcaatggcctcccacgcataagctt

SEQ ID NO: 225 - DNA, 63 bp, Artificial
  Mutation
ctcactcactcatatctgtgttttctaatatacctatatcaatggcctcccacgcataagctt

SEQ ID NO: 226 - DNA, 76 bp, Artificial
  Mutation
ctcactcactcatatctgtgctgtaccaagatgttttctaatatacctatatcaatggcctcccacgcataagctt

SEQ ID NO: 227 - DNA, 79 bp, Artificial; identical to SEQ ID NO: 218
  Mutation

SEQ ID NO: 228 - DNA, 87 bp, Artificial
  Mutation
ctcactcactcatatctgtgctgtaccaacacgctcactagatgttttctaatatacctatatcaatggcctcccacgcataagctt

SEQ ID NO: 229 - DNA, 81 bp, Artificial; identical to SEQ ID NO: 219
  Mutation

SEQ ID NO: 230 - DNA, 58 bp, Artificial
  Mutation
ctcactcactcatatctgtgctgtaccactatatcaatggcctcccacgcataagctt

SEQ ID NO: 231 - DNA, 86 bp, Artificial
  Mutation
ctcactcactcatatctgtgctgtaccacacgctcactagatgttttctaatatacctatatcaatggcctcccacgcataagctt

SEQ ID NO: 232 - DNA, 84 bp, Artificial
  Mutation
ctcactcactcatatctgtgctgtaagacgctcactagatgttttctaatatacctatatcaatggcctcccacgcataagctt

SEQ ID NO: 233 - DNA, 39 bp, Artificial
  Mutation
ctcactcactcatatctgtgctgtaccacgcataagctt

SEQ ID NO: 234 - DNA, 86 bp, Artificial
  Mutation
ctcactcactcatatctgtgctgtaccaaccgctcactagatgttttctaatatacctatatcaatggcctcccacgcataagctt

SEQ ID NO: 235 - DNA, 86 bp, Artificial
  Mutation
ctcactcactcatatctgtgctgtaccatacgctcactagatgttttctaatatacctatatcaatggcctcccacgcataagctt

SEQ ID NO: 236 - DNA, 56 bp, Artificial
  Mutation
ctcactcactcatatctgtgctgtaccaatatcaatggcctcccacgcataagctt

SEQ ID NO: 237 - DNA, 717 bp, Streptococcus mutans
atgaaaacgattttgttgaaatttgctggtcccctgcaatcatgggggaccagctcacactttgaaacgagacatacagacttttatccatccaaaagtgcagtgattggggtgattgcggccagtcttggatatagaaggaacgaggacgaaaaaatcaggaaattaaatgaattggattttgctgtccgggttgatcaacaaggaaatttattgagagattggcataatgcaaaaagcgataaaagaaaagatccatacacaaccaatcgttactatttggaggatgctgtttttgtcgtggcaatttcacatcagaatcatgcctttatgaaaatgattgaagatggtctgcggtctccttattttcagtcttttatgggaaggagggcttgccctctgcccgtagattttatcattcaagtaacaaatgactctgccctcgatagtttgaaacaactagattggcaggcttctgcatggtatatgaaaagggaatcatcagataattggatctcgttagaaatttatacggatagttatttgaccggaaaagaatcttaccaattaagacaggataaagttctctcattttcacaaaaagaaagaaaatttggttttagatatgagtcacgagttcgggttgaagttttgaatccattgtggcaagagcaaagtagcactgaacatgatatttttaatagtataggagactga

SEQ ID NO: 238 - DNA, 642 bp, Streptococcus mutans
atgtatatttctagagtagaaatagatatgaataataggcgaaggatgaagaatctaacgcatgtgggagcattccatgattgggttgagaggagttttcctaacgaaatagagaagcaaattcgcacaagaaaattatggcgtatagatactttacaagggaaaaattatctcgttattatcagttcgggaaaacctgatttgttattacttgaaaaatatggagtggaaggaagtgctcagacaaagttatatgacaattgtttaaatactttaaaaaaaggaaatcgaatgaagtttcgtgttgctttaaaccccgtcatttctttaccatcatcagataacaaaaaaagaggaattgttaagcctcatgttactagtgaatatcagatgaaatatttaaaggataggtctgaaaaaaatggctttctactagatgaagctgaatttttaattgttgaaagaggttatgaagtatttaaaaaagcaaagcctaaacctattagactaataaagactgtttacgaaggtactttaacaataagtgatgttgatagatttagaaaagtattaacagagggaatcggtaagaagaaagcttatggttttggtttgatgacagtcattcctgcaggtgattaa

SEQ ID NO: 239 - DNA, 1080 bp, Streptococcus mutans
atgacaatatccaataatcaagatagactatttttagatatttacgctatccaaacccttcctccatcaaacatcaaccgtgatgatactggtagtcctaaaactactcaatacggcggggttaggcgagcacgagttagctcgcaatcttggaaaaaagccatgagagattatttttatgaacacgctgaagaagaacagcttggtaaacgaacgagaaaagttgtgaattatgttgcagagaaaattattcatcagaaaattgatttgaatgaaaaagagtcctctaaactggctacagatattttgaaattagctggtgttcctactgatggcaaagtattattttttatcggtaatactgaagctgaaaaattggctacggctgcagtgaaaggtgttaaggataaagaggaagctcggaagattatgcaatcaaatcttgctcttgacgtagcattatttggaaggatggtagctaatgataaagaaatagaggctgatgcttcttcacaatttgctcatcctatttctactcatgctgtccaaactgagtttgacttttatactgcggtagatgacttagcttcagatgatgatgccaaagcaggtatgcttggtacagttgaattcaattcttcaacattgtatcgttatgctaatgtggcgattcatgaatttcttgtgcaacgaggtaatagagaagatttagtagattccttaaagttatttattaaagcctttgctgagtctatgccaagagggaagattaattcatttgccaatcaaactataccgcagaccttgattataacagtcaggagtgaccgtcctgttaatcttgtcagtgcctttgaagagcctgtaaaatcttctaacggatatgtgacaaagtctattgagaagctttcaaaagagtttgccaaagttgaaaaaatggtaaagaaaccagtcctatctttttatgtgagcttggaagaagtagaagcgctggctaaggttggtactgaaaagaattccattacagaattggttgaagatttttcacaagaactgtctgatttaattcaaaataggtga

SEQ ID NO: 240 - DNA, 1719 bp, Streptococcus mutans
atgagtagatttaatttattggatgaaccttggatttcagtagttttcgatgagaaatgttcaactaaggaagtgtccttgcttgatttctttcaaaatgcccatcattacaaggatttagctggagatacaaaaactcaagattttgccgttttgagagtgcttttagctgtcctacacacagtattttcaagatttgatgcaaatggcaatgtttatggatatcttgaaattgatgaaaaatatagacagatagaagaaattgaagaagatgaccttgaggagtatgaagatgacctttacgaaacttggctgactctttggcaaaacaggcaatttccagatattattgaagaatatttgaaaaaatggcgagacagattttacctttttgatgaagaatatccgttttttcaagtgagaaaagaggatattgaaatggttatggatttgaataaggatgctgggaaaatttttggaaaaaatattaatcgtttagtgtcggaaagctcaaataagatagctttgttttcaccaaagcataattatgacaacaataaggaacgtctctctaattcagaaattgtaagatggttactgacctatcatggctacagtgaaactggaggtcgtatgaaaaagataggaaaaagggattattcaaaaggttggctttacaatttgggtggcttatttttaaaaggaaaaaatctctatgaaactttattgctgaatctgactttattttattttgagtatgacaaccatttgcatattcaaaagccttgttgggaatttgatagtgcagttattattgacagctatgtcagtagaaaaagaattgataatttagcttctctatatacatcgtggagtaaagaagtttatattgatccacatgttgttcaacctgaatttgagtgcagagtagctaaaattcctgctatttctccaaacgatctatttttggaaccaatgacattatggaagtatgaagagaattcctttcaaccacaatctcattatactaatcaatctttatggaggtcattcggtttaataacaatgggtggtatggagaaattaaatcatatacctggtataatagattggcaaagaacaataaaagataatattgagaatgctagcatcaatatatgttcggtagggatggtgtctgataaaacagctaacaatactccaataattgaagtttttgatactctttccattaacgaatttgtattgactgatatccaaaaagatggttgggtcatcagaattaatgatgaagtggacagagtaaaaaaggttatttcacatacttatgcttattttgttaaggatgtgatagttattagaaaacatattgaggaaaaggaaattccaaaattaaaaaaatcgatacttcgtggctctttatttcgacaggattatgaaaaacaaataagtaatagaatcgaagaactgtatttcaaaattgatcagccttttagacaatggttgtccaatattcaaccgggtgacgacaaggattctaaaatcttggagtggagagaaatcctggaaaaaatcgttttaaaagaagctaaatcacttttatatgaaggtaatccgagagattacattggatggagttacggggaaccaaaaactttccacaatatagccactgcttacgaaagtttcacttattggctaaataaaaatttaaaatag

SEQ ID NO: 241 - DNA, 603 bp, Streptococcus mutans
atgtcggaacaatctaaaccaaccgtttcttcagttaccagaaagatactgatgaaactaagtaatcaaatcgatacttcacctggtaaagctgttctagctaaaattcgtcattccattggaaaaccaatcaataaggctacagaaatatggtcgctgttatttgaaaatttaccagaagaatttttaggaaaatctggtagagcaagttatgaagaaaccgtaattttaatcactgttcaactgtacgccctttaccagcaaggtctatcacacagtgtgctagttgaagatgttgaaaaataccataatattggaagttcactcaggcagctgcgtaaaggagacgatacgactgcaatagatagacgctttaatgtcatgataacctcttcaacatttgaagagttaacctatcatttaaggcatctcgttaaacttttaaaatcaaggtcccctgaaaccaagattgattttgcaaagttatcccaaaatctatattggtttttaagggattctcaggaaactgtccgtttggattgggcgagagaatactacaaacaagataataaaggagaaaaagacaatgacaatatccaataa

SEQ ID NO: 242 - DNA, 2787 bp, Streptococcus mutans
atggataagaaagtactaaggtataatttttgggcgaaaaagcgggaagaaaaaggacaatttctttggcttcctctcatgcagcatttagaggatacaaaaaatgtagctggtctactgtgggaacattggctgggagaagggcaaaaggctctaattatcgcctccttaaagacgggtaagaaagatgagaaaacagccaaacaattagcccagtttttggctgccgtccatgatattggtaaggctactccagttttccaaagtaagaaaggttatgcaaattctaaggatttggatctggaattgttggaaaaattggaacgggctggttttgaagggatttcttcgattacacttgctaatcctgagaaatcccctcatgctctagctggacaatatattctgcattacaataaagtcaaagaagatattgccacaatcgttggaggacatcatggtaagcctgttgatgatagggctacatataaaaatcagcggtcacaggagtcaaattattatcagtcaggaaaatctggaaataccatttatcaaaaatgggagcgagcgcaagaagagattttaaattgggcattagaagttagcggttttaaatctgtggacgagcttccgacaattaaacagcctgcccaagtcattttgtctggcctgctcattatggctgactggattgccagcaatgaagattacttccctttgatttccatagatgagcgtgaagtggaaaataaagccgaccgattgtcgggctttgaaaaatggaaacgcagcagtttgtgggtatcaagaaatacctgggattttgaaggcctttatcaggcacgattcgattttgaacctagggatgttcaagctgtactatcaaaaacgatagctgatacagaacaacctggcatctttattttagaagctccaatggggataggaaaaacggaggcagctctggttgcaacagagcaactggctgaaaaaactgatcgaaatggtatcttttttggactgccaactcaggcgacttctaatggcatttttccgaggattgaaaaatggctagaaagtataaaagaggatttggatgacaatatttctattcagttagtccatgggaaagcagccttgaacgctgatttttctgagctgcctaaaggaatcagcatcaatattgatgattttgaaaatggcagtgtaattgttaatgaatggttttctggaaggaagactgcagtgctggatgattttgttgtggggactgtggatcaattcctgatgcttgcacttaaacaaaaacatttggccttgaggcatttagggttcagtaagaaggttgtagtaattgatgaagtgcatgcctatgatgcatacatgaatcagtatttactggaggccctgagatggatgggtgcctatggtgttcctgttatcatcctttcagctaccttaccggctgagagaagggaaaaactgctaaaaagttatatgtttggaatgggaaaacgttttgaagagaaagaaaaggaacagctatctaaacagttaaaaacagaagcttatccattgataacctataataatggttttgacatttgtcagataacagagtttaaaaagggtgaaaataaaaaaatacttctttcccagctggaggaagaggatttattagacaccgtaaaagggctgttgtctgacggaggcgtggcaggtattattgtcaatacagttaagcgagctcaaaaaatagcaaaagtatttgcagatagtctgggtgaagatatggttgaaatctttcattcgggttttatagcaacagaaagggttcggaaggaacaagaacttttgaagatgattggaaaagatgctaacagaccttatcgtaaaatcattattggaacgcaagtaattgagcagtcgctggatatcgactttgatgtcatgattagcgatttggctcctatggatctgttgattcagcggatggggagattgcatcgtcataagatagatcgtccacagaagcatgtttttccaaaattttatgtgataggaatgaatgatgatttgaaatttgaggaaggctcttcctttgtttatggcgattatttattagcaagaacccagtattatttgccggattcgattaatctgccagaagatatttcaattttagttcaaaaagtttatgatgagaaattagagcttgattatccaactgaacttttggataaaaaatatcataatgcgaaaagtgaacatgagactaaaatcgggaataaagaaagtaaagctagagactatagaattgcagatccagttttaagggaaacgagaagccgcaaggaaaatctcataggctggctagaaaatagtcatcctgatgacagtgatgaaagggcttatgctcaggtgcgtgatattgaagacattgttgaagtcattgcattgaaaaaggttggcgatggttatgctttgtttggcgaaggagaagatctttctgaattaattaccgatttcaatatcgctaaaaaagttgcccaaaataccttgagactgcctatagctttaactaaatcctataatgttgacgacacgattaaggagttggaaatgtacagtaggatgaacttaaataattggcaagattcctcttggtttaagggagctttgggaattatatttgatgaaaataatgaatttctcatcggaggttataaacttgtatatgatgagaaatatggcgtaagaatggaggaaatcgaaaatcatgagtag

SEQ ID NO: 243 - DNA, 720 bp, Peptostreptococcus anaerobius
atgaagacaatagttatgaagttttctggacctctccagtcgtgggggacaggctctaactttgagacaaggcatacggatttttatccgtcaaaaagtgctgtgataggtatgatttctgccggattcggctatcgtagagacgatgacatagctataagaaggttaaatgaattatcttttggagttaggatagatcaaagaggatctttactgagagattaccatattgcacaaaagtataaaattaatggaaattttgaaagaacatatgtaacaaataggtactatattgaagatgctgtgtttattgttgcgatatcccatgaagatgatagttttatggaagagatatacaaggcattagaatatccatattttcagcactttatgggaagaaggtctttacctttaggatatgactttatccaaggcatgtttgataatgacatagttaattgcttagagtctcatgagtggatggcatccagttggtataagaaaaaatatagaaatgataaatttgttgggttagaaatatacgcagatagtgacttaatagatgataattcacatattttaagaaaagatagaccaatatcattttcacagaagaatagaaggtttggatttaggtatgagtcaagaaaatgggttcatgttgtcaatgaccgatatgttgaaagtgatagcaaacatgatgtatttggagcagtgtaa

SEQ ID NO: 244 - DNA, 636 bp, Peptostreptococcus anaerobius
atgtatatatcaagagttgagatagattctgataaccgtaggaaaattaaaaatttatcacatgttgctgcctaccatagttgggttgaggattgttttcctattgagaaggatgaaggaattaggactagaaaattgtggcgagtggatagattaaacggaaggacatatttgctgctagtaagtgagaataaacctgatttgttgggtttagaaaaatatggagtcgaaggcagcgcacaaacgaagtcgtatgatgagtttttagaagaaataaaagaaggaagtgtaatgaagtttagagtagtgcttaacccagttgttgctttatcacaaggtactgggaataaaaataagataaaacctcatgtgacagtagaacaacagatgaagtatttgcttgataggtcaagtaaaaatggatttgaactggaggagagtaactttagtatcgtagaaagaggttatgaaaatttttataaagatgggcaaaagaaagtaagactgataaaagcagtatatgaaggtgtacttacagttagcaataaagagttatttaatagaatattgactgaaggcataggaaaaaaacgagcttatggttttggtttgatgacggttataccagtggtgtaa

SEQ ID NO: 245 - DNA, 1077 bp, Peptostreptococcus anaerobius
atgagaaacgaacagcgattatttattgacattcatgtagtacagactttaccaccatcaaatattaatagggatgatacaggagctccaaaaactgctcagtttggtggagtgaaaagagctagggtgagttctcaatcgtggaaaagagcaataagaatgtattttcagaataatggtgaccgagttgattttggtgtacgtacgcacagcattgtagactatgttgcgaaaaaaataatagaaaaagattcgtccatttcttatgaagaatctatgaaaaaatctgaaaaagtaatcaacgatgtcataacaaaaacaactaaagatatgaaattaaaggctttgtttttcttaggagactttcaggctaatatgctagcagatgcgattataaagggtgtaaatgataaaaaacaattgaaagaaattttgaaaaataatccaagtatcgatattgcattatttggtagaatggttgcagatgatccatccctaaatgaagatgcatcatctcaagttgcacatgctatatcaacacatgcaatacaaaatgaatttgatttttatactgcagtagacgatcttcacagtgatgataatgcgggtgcaggcatgcttggtaatattgaatttaactcatcaacattgtatagatatgcaaacatagctgttcatgaattatcaaaacaactcgacaacaaagaagcagttattaatacagtaaaattatttatagaagcgttttctaattcattaccaacaggaaaggttaatacttttgcaaaccagactataccaaatgctattattgttactgtaagagatgatagacctataaatatggttggagcctttgaagaaccgattagatcaaatggagggtttgcgagcaaatctatagagaaattagctgaagaaatgaaaaaatctgagaagtttgttaagaagccaataaaatcgttatacgtatcaatggaacagatctcatcaatgaatgacgtttcagaggaagcagggtgcctacatgacttattggaagaaatagcaaatgaacttgataaaaaactaatataa

SEQ ID NO: 246 - DNA, 1746 bp, Peptostreptococcus anaerobius
atgggaaggtataatttactagacgagccatggatatctgttatcattgataaaaaaggcaatagtaagaatgtatctatgattgatttttttaagcatgctcacgagtatctagatatgggaggagatacaaaaacacaggattttgcggtaatgagagtaatgatagccgtaatacatactgtattttcaagggttgatgtatcgggtgaaccatatgaatattttgatattgatgaaaggtttagacagaaagaacttattgatgagtacgacgtagatgactatgaaggtgatttaataggtacgtggatagatatttggaaaatgaaaaaatttccagacgttgtaatagagtatttagaagcttggagggataggttttatttattcgacgacaaatatccatttttccaggtgacaaaagaagatattgaacaggcagactctgataaagaaaatccaggtgaattttttggtaaaaatataaataggaaaatttctcagagtggaaataaaacaagcttattttcacctaagtatgaaaaagaaaataatagagatattcttgatgaagatgagatagccagatggttacttacacttcaaggatatgtaggtcaatcagacaaggtaaggtttaaagtaaaaaaagaatatttgatagaggagaagtataaagcagcgaatggatggttatttgatttaggaggtatatatattcgaggacaaaatatttttgagaccataatgttaaattgtgttctagcgaataaaaatcaaaataacttaatgaatagacagacaccgtgttgggagttagaaaacagagcattattaaaaaaatatttaaattcagctggagatatatacgataatgaagtatcattactaactgcttggagtagggctgtatttatagatccagatactgatgcgaaaaaaccttttgtatgtggtatagtaaaattacctgatgtagatcaccgaaataagattattgaacagatgacaatttggaattacaatgaaaaaggcaaatacaaaaatacattcacaccaagaaaacatcaatctaataagtcaatatggaggtcttttgggttaatttcaggtaatgttgaatcgggagaggataaaaaatatttgaaaccaggagttatagagtggttaaatgatatttcttcagttatgagtactgatatatttattgataatatgttaaatatttgttctgtgagtatgaaggacaatgggcatcaagcttcaatggtacctgtagacgaaattgtagatgatttgtttatatctgaaaaagtattcttagacaaagagtgggtggtaagaataaatgaaacgatagaaaaaacaaaaacaatagttaggtctgcatttagtgaatttattgaagatattagagagattagaaatataaatgatagagattttacttataaaaaaattgaggaattgtattattcaatagactttatttttagagattggttattaggtttgaaacttgatgacgagaaagaagaaaaaatatttgaatggaatagaatcttaagaaaaattgtgatagatgaagcaaataaagttgtaaaaaatgctaataatcgagacttcaaaggtaaaaaagttgatgatggaatgaaaaatattgcaacggcatataactatttcatatattcattaaaccataaaattaaaataaagaaggaggcagcacatgaagaaaaatag

SEQ ID NO: 247 - DNA, 582 bp, Peptostreptococcus anaerobius
atgaagaaaaatagcatatactcggtcacaagtagtattatctataagctaaatgcactcagcgaaatatcttcaggaaagtcatacctagcaaaacttagaaattccataggtaaggatattagttcgtcaagtgaagtatggtccattttatttgaaaatttgccagaggaatttctaggtgatgaaaatagaatcactactgaagaaagagttattacacttactctacagttatttgctctaatgaaccaaggaagtaatagaatttcggtaaatccagacgatgaaaataagtataagaatatcggttactcaattagagttttgagagatgaacatggtgagtctgtagataggagatttaatgctctattaacatcatcagatgtggatgaattgtctacacacctaagatatttattgaatttattaaaagctaagaccacaggaacatatgttaatttcccaaaattagctgaagatatgtactggtactcgaaaggatatggagatagtgttaagctatcttgggcaagggagtattataggaaaaaaattgagtttgataacgaaaagtaa

SEQ ID NO: 248 - DNA, 2778 bp, Peptostreptococcus anaerobius
gtgatagttataaagagaattaaatatctttgggcaaaaaaaagtcaaaaaaatggtaggtttttatggttacctcttatgcaacacttagaggatacaaagaatgtatcattgctgttatgggaaaattggttaagtgaagggcaaaaaaaaataataataaattcaatagtagataaagatgaaaaaaaggcaaagcaacttgtaaaatttcttggttacgttcacgatattggaaaggcaacgccatcatttcaaactatggaaggttttactaactcaagtgatttagactatgaactgcttagtaaactagaatatgccggatttaagggaataacaagtaaaacatttgcatcaagaagtaaaacaaggcataacattgcaggtcaatttatactaagtaactttggtgtaagagatgaaattgcaacaatagttggtggacatcacggaaaaacgattgataatattaatgaatgtatgaatcagtctgcgtacaaagctaattattatcaagacgaagggaatacgggcgtaaatgccttatggcatcaatgtcattatgagatttttaatgaggctctaaatctatgtggatatggtagcgtagatgaaatatctgcagtgggacaaccagctcaagtaatattacttggtttacttgttgttgcagattggattgcgagtaatgaggagtattatcctcttatagatataagtaaggatgaggttgaggataaggatcatagaaggagttgtggtttcaaagaatggataaaatctgatttgtggcaaccagatgaaaatgttgactttgtcagtatgtacaataacagatttgactttgatcctagaaatgttcaggaaaagctatctgaagtaataactgaatgtgatgagccaggcatatttattttggaagcgcccatgggtatcggtaaaacggaagcggccttgattggttcagagcaattagctgcaaaaacaggaagaagtggtttgttttttggtttacctactcaggccacatcaaatggcatatttccaagaattattacatggttgaatagcataaaggaagactacggagatacactgcaggttagacttgcccatggaaaggcacatctaaatgattcttttacaagcatagctagtggtataggcatagatggtgatggtagtataattgttaaccagtggttttcaggaaaaaaaacgactgctttagatgattttgtggttggtacagtagaccaatttttattgctgtcactaaagcaaaaacatttgtttttaagacatttgggttttagtaagaaggttgttatcattgatgaggttcatgcatatgatgcatatatgagtcagtacttaaaagaatctttaacatggatggcatcttatggtgtgccggtaatattattatccgcaacactgccttctaaaagcaggtcggaaattatactatcatatctaatgggaaggtcaacaaaaatttcaaagccagaaagagaagaagttaaagttaaattggaaaatagggcctatcctttgataacatatactgatggtaacaatgtgaaaactgaaactcaatttgttccaatagaaaataagatggttaaagtaaattctatagatgaagatggactaatacagttggttgagtctatgataaaggatggtggcgtagtcggtattatcgtaaatacggtaaaaagagggcaaaattttgctaagatgctatccgattattttggtgatgatttagtattattacttcattctggatttatagcaactgaaagagtaaagaaagaaaatgaattgttgtctattataggaaagaaagcgagtagaccagagcgtaaaattatcataggtacacaagtaattgagcagtcattggatattgattttgatgtattaattagtgacctagcaccggtagatttactcatacagagaataggaaggttacatagacatgatgaaaggataaaaccagctagtcatactaatcctagactatatattttaggtaaaaattctcaatatgattttgaagagggtagtaggaatgtatatggtgattatctattgatgcgaacacagtactttattgataagtacagcgaaattgcaattccaggagatatttcagacttagtgcaagatgtatactctgatgatgatatagatttttcaggagaattaaaagaaaggtatacactgtataaagaaaataataaagagctgaaacagcataaagagaatatagcaaatacttttaggattgataatccaattgtcagtcaaaataaaaaaagaatagtaaagaaaaataatctgataggatggattaataaaggaataatggataacagtgatgagaagggatttgcacaggttagagatggcgaacagacgatagaggtcattgtagtaaagaaaattggagatggatacggggtatttgacagcgatgaggatatatctaaaaaaataaacgacgagattgtagctaaaaatattgccagaaatactttaacgttaccaagatttttcagtgcagtgtataatattgataaaacgatagatgaacttgaaaaatataataataaaaacttaagtaaatggcaaaaatcaatttggcttaaaggatgcttgggaatagtattagatgaaaataatgaatttgttttgtgtggcaaatgcattaagtatgatgaaaagtatggcatatgtatacttgaggaaggaagtgattaa

SEQ ID NO: 249 - DNA, 876 bp, Gardnerella vaginalis
atgaaaagtttattactgaagttttctggaccgttgcaatcatggggtacagattctcattttgagactcgtcacacagactactatccatctaaaagtgcggtagtaggtatgattgctgcagcttttggatatagaagaagcgcagattgtgatgaagagattgcaaagcttaatgatttagattttgcagtacgaatagatcagcaaggaaatttgcttagagattatcatattgctgcaaaatataagtctaacggtgactttgaaaaaaattacgttacaaatcgttactatctagaagatgccatattcctagttgcaataggatccgataatgagcaacttatttacagtattaacgatgcgttgcgctcgccgtattttcaatctagtttaggcagaagatcattgcctcctactgctgactttattctaggagtagaagattgtggagtaattcaggctctattaacgcatgagtggcttgcaaacaagtggtctaaaaaaagatttaatacttttagactatctgattcatcagagtctgctgatgaatcatgcaatgaagtatttatatccttatacgctgattctgatttagtagataaagctgcagcagaattagttaaagacgatactagtacttataaaattcagggatcagttcgcagattgcgcaaggatttcgttaattctttctctaacaaggaaagaaaattcggattccgttacgagtcaaaagtggaaatacctattaagagaattctccacaataattcggattcggaaggtatttcatcagatagtaagcatgtgaaatctactggagattttattgctgagcatgatgctttttctggattggagtcttaa

SEQ ID NO: 250 - DNA, 648 bp, Gardnerella vaginalis
atgtcttatttaagcagagttgaaattgattataaaaagccctcatcattgagagatcttaaatctgtcggagcttttcacaattgggttgagcaaagttttcccgacgaatgggagaatcatgaaagaagccgaaaactatggagagttgatgttctgcatggaaaacattacttgcttatagtgagtgattctgaaccagatttgcaacgtctagagatgtatggtgttgctggaacagcgtcaagtaagaattatgataagtttttaggctcactgatgaatggcatgagaatgcaatttcgtgtgacgcttaaccctgttgtttctatttctgatactgctgaaactcgcactactagaggtagggtagtaccacatgttacttatgatcagcagatgaattttttgcttaatcgcgcacaaaaattaggtttttcgttgaacgaaaatgaattcgctattgttgaacgcggatatagcttatttacaaagtcagaaaaacctattcgattaagtaaagctgtttatcaaggtattttaacaattagtgatgcaaagattatgcgtaaaacactgttagaaggaattggcaaaaagaaagcgtatggctttggaatgatgacagtaattcctttagacaattaa

SEQ ID NO: 251 - DNA, 1089 bp, Gardnerella vaginalis
atgaacgctcatttattcttagatattcaagcaatccaaactgttccaccatgcaatattaatcgcgatgatgcaggcagtccaaaaactgctcaatatggcggtgtaactagaaccagaataagttctcaatgctggaagcactcaatgcgtgaatacttcaaagagcacagcggtgattctaatgttggaatacgaagcaaaaatattgttaaatacgttgccgataaaatcattactttaaaaccagaattatctgaacaagaagcattagatttagcagataaaacgttaaatactgctggagttaaaactaaaacagataagggggaaacagttcctacatcaaaagctttattcttcttaggcgagactcaagcaaattctctagctcaagcagcaatcaataatgttactgacaagaagcaactgcaagaaatcttgagagataatccacctattgatattgcgttattcggtcgcatgcttgcagacgatccatcgcttaatgaggacgcttcttcgcaagttgctcacgcaatttccactcacgctgttcgtactgaattcgattactatactgctgttgatgatttatctgcggatgataatgctggagctggaatgcttggaacaatagaatataattcttcaacgctgtatcgttatgcaaatgttgcagtacatgaatttagccatcagttgagtgataacaaagaatctacaattaatgctcttagactttttattgaagctttcgctaacgcaatgcctactggaaaaacaaatacttttgctaaccaaactttgccgcaaatgctggtggtaactttaagagatgacaggccagtgaacttagttagtgcatttgaagatccagtaaaatctaaagacggatatgtctcaaagtctatagataagctatctcaagaatacgagaaagttcaaaaattcgtccataagccacttgcatcattctatgtaacaatggattcttcaaatgagaatcttaaattaggagtggaagaacaaagtatgcagcaattattggatgatttttcttctaaagtccccgaatttcttcagtaa

SEQ ID NO: 252 - DNA, 1671 bp, Gardnerella vaginalis
gtgagcaggtttaatctactagatgagccttggatttccgtcattgtagacgaaaaaggccacaataaactcgtatcaattacagatgtatttaagcatgcatcagaatataaagctcttgctggcgatatgaaaactcaggactttgcattgcttcgtgttttgcttgctgcgattcatactgttttttctaggtactatattcagggaaattctcgtgaatttgattcaggtgaagatagtgaagatgatttcaatgaagaaacaatggatatttggcgcgaagtttggaattcaaaaaagtttccagatgcagttttcaaatatttagaacaatggcatgatcatttctacctttttgatgacaaatatccatttttccaagtacttaaacaggatatcgatagtaaaaagcttggcggtaaatctcctagtgagatatctggtaaaaatataaatcgattgatttctgaaagtaacaataaaatagctgtattttctccaaaagataatgttgataacaacaaatcgtcacttactgaaccacaattagcaagatggattattaccttacagtcatacgctggattagcagataagaccatgtttggtacggaaaaatataaagcttctaaaggttggctttttgatctcggcggtattgagataataggagcaaatttatttgaaactcttatgctcaattgtgtacttgttggcgatgtgcaatctcctgagaaaaaacaaaagccatgttgggaatattcaggaacagaaaatattgaaaattcgttttatgaaacatttattgacaatgtttcccagctttacactcgatggagtagagcaatatatataaatcctgatattagcattgacaagccaatatcggtttctatagtgaaacttcctgatattaatcataaaaatgcttttattgagccaatgacagtatggcagtataacaaagaaggtgaaaataaggataaatacactccaaggaagcatagaacagaagaagctatgtggagatcatttggactccttacatcgcaagaattatacgatggtagtgtaaaaaatcacaaaccaggaattatggaatggcttaacgaaattaaacatgatattgctggctcttctatttcactgcaagctataagtatgaaagatgatggtaatgctacatcttgggttcctacagatgaaatatgcgatactttatatattgatgaagtcgtagtaactgataatgctgacgatggatgggtatacagaattaacaatgaagttgagtatacaagatctgccataggattcatttacaagcaatttcttctcgacatatgtgaaatacgcaatagaagtaaagatgatgcaactaaatattctgctaagtacattagtcaggcttatttcttagttgatcaaccgtttagagaatggttagcaaatattaaaccaaaagattcaatgaatgaacgttgtactcaatggagaaatactttgcataacatactcatagatgaggcaaaaggaatgctagaaaatgcaacattgcgcgattttacaggtagaccatctgatcaaagcgagaaagaatctacaaaaaatatagttacagcttacaacgtttttactagtcgattaaaaaaattatcaggaaaataa

SEQ ID NO: 253 - DNA, 615 bp, Gardnerella vaginalis
atggctgaaaatcaaagcaaatctgttgaagtatcaagcgttgtcagtaaaatcataaatcaattcttgaacggctcagatattgcatcgagacgaactatgcttgctcaactacgtcacacaatcggtaagccattaagtcagtcaatagaaatatggccatggatattaaacaatgtgccagaaagcttcatagataaatatggcgaagttaactaccaattgcgagctgttataaacactttgcaaatatacgcattgtacgagcaaggtgttgcagaaaaatcaagttataaagatttgaacaaatctgaagattcagaaaatgaaaaatcttataacaatatgggaacagctttaagaacactaagaagtgatgaaggcgtacgtggagctatggataggcgctttagtgttatgatcactgcaaacgactacgaaagtttttactactaccttcgtcaactagttcgactactaaaaagcagaacaaaagaaaatcaacaatcgattgattattctaaactagctcgcgatttatatttgcttcagtttgaagattcagaaaaagtaagactttcctgggcgcaagaatattatcgcttaagcaagtag

SEQ ID NO: 254 - DNA, 2856 bp, Gardnerella vaginalis
atgagttgtaatcacgttgttaatactgaattatggggtaaaaagagagaagttaatggagtaatgcaatggcttcctcttgctcaacaccttgaagatactggaaatgttattggtcaattatgggatcattggcttagtgatggtcagcgaagattgattgaatcttcattaagtaaacgagttgatgcaaaaaaattatctcaatttttaggatgcatacatgatattggtaaggctactcccgtttttcagtttcgaaaatcgtattcaaattcaaaagatttagatattgcgttaaaaaataagttagctactgttggttttacaaatatcaatgattttattattaaggcagaagattggtcgagtagtcatcacactataaccggtcaagctattctttctaatactggagttcctgaagggatttgtgcaatagttggcgctcatcatggtaaacctttagataatgattctgtttataaaagtaacgaatctgcgtatactgaccattattatcaaagtgaaactgagagtgaaaatagtaaattatggcaaaagttgcagaatgatattttggattgggctttagaaagaaatgatttttctaatgtagatgatcttccagaaataagtgaaccagcacaagttttattgtgtggactagtaattatggctgattggattgcaagtaatgaacaatattttccgcttattccaatagagaaagatttaatagaaaatcaggaagaaagatatagaaaaggctgggaaaagtggttacaacatggttctaaagacgtatgggaatcattaaattgttgtagcaatatttcgcaaatatacaaacatcgttttggtttcttgccgaatagtattcagacagcgttgtacaatgtaatttctcattgcaaagagcctggaatttttattcttgaatcttcaatgggttcaggaaaaacagaagcttctttaattgctgctgagcaattagcaaatctaaccggaagaagcggagtattcttcggtcttcctactcaagcaacttctaatggaatgtttaggcgagttgaggattggcttaaaagtgtgaatagtgattttcagggtgagattggtttacgtttagttcatggtaaagctgaactgaatgcagattatgcgcatttgctgcatggaatgcaaaatatgaatgatggttgtgaaagtacttctagtagtaatgatgtaaataataatggagtaatacttaatgattggtttactggacgaaaaactgcaatgttggatgactttgttgttggtacagtagatcaatttttgttagcttcgttaaagcaaaaacatcttatgcttcgtcatttgggattaagtaaaaaagttgtaattattgacgaagtgcacgcttatgacgcttatatgaataagtatcttgaagaatctcttgtttggatggcagcatatggtgttcctgttgtgttgctttctgctactttacctgctaagcgtagaaaagaacttataaaagcctatatgtgtgggttgtttgggtttaattggagagaatgcgataaatctaatgttgattttgaaacaaataattatcctttaattacgtacagtgataaaaactgtgtaaaacaaaaatttattgaaaatgatgctagtgataataaatctgtttctgtaagaaaaataacagacgatagcttacacgaatcacttgttaatgagcttaaatccttgctaaataatggtggtattgctgggattatagtgaacacagttaaaagagctcaggaaatttataatgcatgcgttggtgagtttactgacgaagaagttatagttattcattcgcaatttattgctacagatagagttagaaaagaacaacaaatttgcaatatgataggcaagaatgctcatagacctgttcgtgcaataattatcggtacgcaggtattagaacagtcacttgatgttgattttgatgttttgtttactgatctcgcacctatagatttattacttcaacgtgctggtagattacacaggcatatgatagaacgtccagattcttttaaagagccaattttatatgtgttgggaaccagtgagcgttatgaatttgagaaagcttctgagtctatttacagtaaatatttacttataagaactcaatactatttgccagatgttataaatatgcctcaagatatttctcgattagtgcaaatagtttatggcgataatcttttagagttacaagaagatttgaaagatgcgtatgctgctgcaaaaagagaacatgattcagtcagaaatagtaatgaaagtgccgcaaaaacatatagaattgaaaatccaaaatcagaaattggcaaaaaatctatcgtcggtttgttgaaaaattcaattacaaatgaatctgatgaatttgcatgtgctcaagttcgtaatagcggtgaatctatagaagttattgctgtgaaaaaagttggatctggttatggaactttccatgattgtgaagatatttcgcaaaatattgattattcagaagttgcaatgagacttgctcaagaaacagtaggattgccgtggatgtttacattaaataataatcgcattgaagaaacgattaacgaactggaaagaatacgcaagcaaaaacagttccaaaactgggataatcagccttggttgcgaggttctttggttttactattcgatgaaaataatatttgcgaaatatcgaaatatagagttgtgtattctgaaaaaagtggtattgtatgtattaagagtttggaagaagacagaaaggaattaaaaggtgagcaggtttaa

SEQ ID NO: 255 - DNA, 768 bp, Pseudomonas sp. S-6-2
atgactgactatctactgctgcggctctatggcccgctggccagctggggcgagattgcagtcggcgaatcgcgacactcggcggtacaaccgtcgcgttccgcgctgcttggtttgctgggtgcagcgctgggtatcgagcggcacgatgatgccgctcagcaggcgcttgtggacggttaccgctttgcgatcaagctggaatgcataggttcgcccttgcgtgactatcacacggttcaggtaggcgtgccgccgcgcaagttccagtttcgctcacgtcgtcaggaattggctgccgacaaagtcgatactattctgtcgacccgtgagtaccgctgtgacagcctcgcgttggttgctgtggaagccttgcccggtgcgccggtggacttggcctccctggccgaagcgctgcgtaagccgcgcttcgccttgtatctggggcgcaaatcctgcccgcttgctttgccgttgagtccaaaaattcttgccgccagcagtgtgcgtgaggtgttcgacaatctggaattgccttccttgctgggtttgttggatcgctatcagcccgagcaagcctggccaagtcgacaggaccaacaggcactacgtcccggtgtcgcgcgatactattgggaagacgggatgactgctggcatggcgccgagctttgaggcccaacgacatgatcagccactctcccgtcgccgctggcagtttgcaccgcgccgcgaatgggtggccttgaatgatggagggcagtcatga

SEQ ID NO: 256 - DNA, 663 bp, Pseudomonas sp. S-6-2
atgagccattatttctcgcttgttagactgatcggcagtccgcgtcacgatgcctggctgcgtgacttgtcgcgccatggtgaagcctacagggatcatgcgttgatctggcgcctgttcccgggcgatggcgctgcacgtgactttgttttccgccgccttgaggacgaaaaaagtttctatgtggtttcagcacgaccaccacaggccgatgcggggttattccatatccagagcaaagcctattcgcctgagttggccgagggtgattgggtgcgattcgacctgcgtgccaatcccaccgtcagcgtgcgccgggaaaatggtcgctcacagcgtcatgatgtgctgatgcacgccaagcagcttgccagcacagaaaaatcggcactacctgagcggctggaagcagcaggcagggaatggctgaaagacagggcggaacgctggggactggatttgcgtactgacagtcttatgcaaaacggttatcgccagcagcggttgaagcgcaagggtaaacacatcgctttttccacgttggactatcagggcattgcccaggtgacggaccctgaacaattgcgccgggcactgctcgacggggttggacacagcaagggctttggctgcgggctgttgctggtaaaacgtgtggactga

SEQ ID NO: 257 - DNA, 1035 bp, Pseudomonas sp. S-6-2
atgactcgttttgtgcaattgcacctgctgacgtcctacccgcccgccaaccttaaccgcgatgatctgggcaacccgaaaaccgcacgcctaggcggtgttgaacgtctgcgtgtgtcctcgcaaagtctcaaacgcgcttggcgtacctcggagctgtttcagcaacagttggccgggactatcggcacgcgcaccaagcgccttggtatcgaggttttcgaggcactgctgggtgctggtgtcactgagaagcaggcgcgtgagtgggctggacaaatcgccaaggtttacggggctgcgaaaaaggataatccactggaaatcgagcagctggtccatatcgcgcctgaagagcgtgcttcgctggatcaactggtggccacccttgccgcggaaaaacgcggcccaacggatgaggagttggacgccctgctgcaccaccagacagcggtggatatcgccatgtttggtcgcatgctggcctccaaaacacagttcaacggagaggccgcagtgcaggtagcccatgccatcggcgtgcacgcatcggctattgaggatgactacttcaccgccgttgacgatctcaaccgcaatgatcctggcgctgcgcatatcggtgaatccggtttcgccgctgcagtgttctaccagtacatctgcatcgaccgcgatctgctgaaacggaatctggggggcgatgaagtgctgactcaaaaggcactccgggctctgactgaagcggcgctcaaagtggggcccagcggcaagcaaaacagcttcgccagccgggctttcgcccactttgcgctggccgagaaaggcactgatcagccgcgctctctgtcactggccttcgtcaaaccggtggccggcacagactatgccggtgatgccgttgcggccttgcaacaggtgcgcgacaacatggacaaggtctatggagtctgcgctgaaagccgctgccagttcaatgtgctgacgggtgaagggtcagtggccgacctgcttgattttgtcgccgcggagtga

SEQ ID NO: 258 - DNA, 1554 bp, Pseudomonas sp. S-6-2
atggatttgttaagtgatacctggctgcagtgccgccatcgtgatggcacgctgaagccgatagctattgggcagatagggctagaagactgtttagagctggttgcgccacgccccgacttccgtggtgcgctctatcagtttctgatcgggttgctgcaaaccgcctacgcgccagaggatcttcaggagtggcgtgatcgctatgccaacccacctaccgctgatgacctggcagaggttttcgctccttaccgcgacgccttccagctggaaaactcagggcctacctttatgcaggacctgaccttgcccgatgacgtcaatcagctgccggtgctggagctgttgattgatgccggctcatcgagcaatcagtatttcaacaagccggcggttgagcacggcatgtgcgagggctgctttacccaggcgttgctcaccatgcagttgaacgcgccctctggcggacgaggcattcggacctcgctgcgtggtggcggtccgttgacgaccttgctggtgccagccgaacagaacgcgacgctttggcaaaagctctggctcaacgtcttgcctcttgatgcactcgatcacccgccgatcaagatgctcagtgacgtattgccctggctggcaccaacccgcaccagcgatgacaaacagggccaggatacaccgccggagtcggtgcaccccttgcaggcgtactggagcatgccgcggcgcattcgcctggatgcagccaccttggatcagggggattgcgcggtatgcggtgcccagaatgtaaagcgtatccgtcattaccgtacccgccatggcggcaccaactacaccgggacatggactcacccgctgacaccctacagcctggactcgaaaggagaaaagccgccgctctcgatcaaggggcgtcaggccgggcgaggttaccgtgactggctgggtctggtacttggtaatgaagatcaccagccggatgccgcgcaggttgttcggcacttcaccgccaaactgggcaagccgtccgtgcgcttgtggtgcttcggtttcgatatgtcgaacatgaaagcgttgtgctggtacgacagtctgttgccggtacacggcgtggcacctgacgttcagcggaagtttacccgcagcgtcaagcaggtgctggattcggccaatgacatggcctccgttctgcacaaacaggtcaaagcggcctggtttcgccgtccgggcgatgccggtcaggagcctgccgtgacgcaaagtttttggcagggctctgagacggccttttatcaggtgctggagcagctcagcaagctcgattttgacagcgcggccgagttggcagcgatctacagagcctggttgcaggccacgcgtcgtctggtgctaagtctgtttgaccactgggtgctgagcggtccgctggaagatatggacatgcaacgcgtggtcaaggcccgggctgatctggccaaagagctgaatactggcaaggcacaaaagccgctgtggacaatcgttaatcaacatctcaaggagcaggcatga

SEQ ID NO: 259 - DNA, 642 bp, Pseudomonas sp. S-6-2
atgaagccgagaaagcccagattgaacgaggcccagcagcgctgggtgcgcgactggtggcgcgccttgcagccccgcgccgagggtgatgaacccatacccggcgagctgtctgtcatggggaggggtgagcgggcacaactgcgccgctgcaccgatgccgatgagctgcttacccagtcagccaccctgctgctggcgcaccgtttggttgcactcaatggtgagcgaggccctttgcctgataattccttgagctacgagcgcatggcctgggtggccggggtgctggctaacgtcaaggacgacctgcgtgacggcaagagtctggctacgcaccttgggcaggctgctgatgccgagcgcccgccgatgagcgaactgcgtttcagggctatgcagcgcggcacggcgatgcaggagctattcctgcattggcgtcgggcgttgcaactggccgggggcaagactgatgtggcacacctggcagatgacctgctgagctggcagatagagcagggccagtctgctgctcaggcgagcaacggggtcaaatttcactgggcctatgactactatctgagcgcccgggaccgggcagccgccaaagaacctgaattcaacaaggagatatccaaatga

SEQ ID NO: 260 - DNA, 2736 bp, Pseudomonas sp. S-6-2
atgccaaatcaagcatcatatttttcctactggggtaaagcatcgccactgagtcaagctggtgaacgatttcatttgctaccttttcactgcctggatgtagctgcctgcggtcaggcgctgatcagcttgccgtctttttcgctcaagcctttggccgaagagctgggttggacacaacctcaagtcgagtcgttgttcacctttttcctcaccctgcatgatctgggcaagttcgcccgagccttccaggggctggtacccgatctttcgccggatttggttccggctgaacccggcaaatgctacgaccggcgacacgatacgctgggttggctgctttggtcgcaggatcttgccgctgacgaccccatagacaatctaccgcagcctgagcacgagttctgggccgtatgggtgcgcagcgtggtcggtcatcatggcaaaccgccggaagaggtggccgatgccggcctgaccgcgctggagctcactgattttttcctgcgtgccgatcggcgcgcggcccgtgagtttgtgcaggcgctggctggctggatgctcccggccgatttgccggtgcctgatcgcgagcagttgaagatactcaggcggcatgcttggcgcctggctgggctggcagtattggccgactggttgggttcgaaccaaggctattttccctatcgcagcctgccgatgtcattgccggagtactgggagttggcccggcagcaggctgaacacgccgtaatcgcgtccgggttgaggtggcagccgctgcgaccctggtccaacccgctggagttgtttgattatctacgtgaaccgacgccattgcaggcctacgcagccacagtgccactggaacacgggccgcaactgtttttgttggaggatgtgaccggggccggcaaaactgaagcggcattgatactggcacagcgcctgatgcaagccaatctagcccatggcctgtatttcgccctgcccagcatggcgacagcgaatcagatgtatcaacgggttggaggggtatatcgccgactctatgaacctcaggcaaaaccgtcattgatattgtcccacggtgcgcgccaactgattgagggcttccggcaaagcattctgcaaagcgccgaacaagcggaggattgccgttatcagcccgacgagggctcggccagtgttcagtgcaatgcctggctggcggacaaccgcaagaaagcgttattggctgaggttggggtgggtacgctggatcaggctctgcttgccgtactgcccgctcggcatcagtccctgcgcctgctggggctggcgggcaaggtgttgctggtggatgaggtgcacgcctacgacccttacatgatgaccgtgttgaagaccctgctgattgcgcatgcccggcaaggtggcagcgtgatactgctctcggccaccttgccactggcggcccgcgaagaactgctggcggcctatcgattcgggcttggcgtaacggctgagacggttgttgatgatcggcgctatccgctggctacacaggccggcaaatccctgaacagtcatgcctgcgaaacgcgcccacaactgcgacgaagcgtggctgtgcgtccgttgcacgatgaggcgtccgtggtggagttgatagttgctcaagcaagggtcggtcgttgcgtctgttggattcgcaacaccgtggacgatgcgcgtcgggccaaccaattgctggctgagcatctgccggaagagcaacggatactcttccatagccgcttcgccatgggccataggctggatatcgaggcacaggtgctggcccgttttggcaaggcgtcgaccggacaggtgcgtgccgggcaggtgctggtgggtacgcaggtgttggagcagagcctggattttgatgtcgatctgatggtatctgatcttgcgcctgttgatttgctgattcagcgagcaggacggttgcagcgtcatgcgcggcaggccagcggcgacctggctgttgatgcggtcgagcggcgcgaacccccggtgttgtacctgttgacaccggagcccgtcgagaatccgccggcggactggtacgccagtttgtttcccaaggcttgctatgtctacccggatgcaggccggctttggctgggcgcgcgggcattgttgcaagcgggctgtattgtgacaccgggtgaacaggggcagaccggcgctgtgcgagaactggtcgaagcggtgtatggcagtgaagttgacgatgtgccgaatgcacttaagaaagccagtcaggaccagctcgggaaagatatggccatgcagagtcaggctcatttcaacggcctgcgcctggacaagggctactgcattgacagcagtgcccgctggtatgaagaccatgccgtgcccacgcgtcttggcgatgaaacccaggcgctgtacctggcgctatggaccgatggcgagttgcagccactgtgcgccgatgcggcctatccctgggaagagtccgcagtgcgtatagccgcccatcgtgcccgcgagctggcaccggactggcagcaacagtttgccgcgccactggaacaactgcgtaaccgctatcggctgctggaagagccggcctttatcttgcctttggtgacttcaggaaccgctctggtcggcaaagtgttggatgaaaaaggacgggtgctggatatgcgttatgacaggcaacaggggctgagttggtga

SEQ ID NO: 261 - DNA, 774 bp, Ralstonia solanacearum
atgaccgagtatctgctcttccgcctgtacggcccgctggccagctggggtgagatcgcggtgggggaatcgcggcattccgccatgtatccgtccaagtccgccttgctcgggctgctgggggcggcgctgggcgtgcggcgcgacgacgatgcgggccagcaggcgcttgcacgcggttaccggtttggcgtcaagctgctcacagccgggacgccgctgcgcgactatcacaccgtgcaggcaccaccgcagcgccgcaagacggtctatcgcacacgccgccaggagctggccgatacgcaggcgctgggtacgctgctttccgcgcgggagtaccgctgcgacagcctagcgctggtggcggcagaagcgctgcccgatgcgccgcatgcgctggatgccgtggtcgaggcgctgcgccgcccgcattttccgctgtatctcgggcgcaaatcgtgcccgctcgcgctgccgctccagccgcaactggcccgtgcggaaaccttgcgtgccgcgctggatgacgcccggtttccttcgccgaccgcgctgctgtcgaaccatccggagcggccctggccaacggagcgggacaggcatgtcttcgcattccaacccgccgcacagcgctactactgggaagacggcatgcacgccggcatggagcctgcactgcaactggtccgcaacgatcagcccttgtcgcgtcggcgctggcagtttgcgccccggcgcgagcacgccgtcctcggcacggaggccgaagcatga

SEQ ID NO: 262 - DNA, 669 bp, Ralstonia solanacearum
atgagccactacttctccagggttcggctgcagacgcgtccgcgcgacatggccttgctcgccagcctgagccggcacgggcaggcctatcgggaccacgcattgatctggcggctgtttcccggcgatggcgccgagcgcgacttcgtttttcgccgcatgcaggacgaccgtgggcaaaccggctatttcgttgtctcgcagcgggcaccgtgtgccgagcctggcttgcttgacgtgcagaccaagccctacgcaccgcaactgcgggagggcgagcgcatccgttttgaattgcgggccaacccgacggtgagtcggggcaccgtcggtcaacgctcgcgccggcacgacgtgctgatggacgccaggcaacacatcaccgacccgcacgcgcgccaggccgccatggacgcggccgccatcgactggctgatccgccgcgcatccgactggggcctgacgatcgccgccgaatgcgtcctgaccagcggctatgcccagcatcgcctgcgacgcaaggggcagccgattgcgttctcgtcgctggattaccagggggtcgcgcaggtggcggatacggggcggttgacgcaggcgttgctgcacggcgtcggccacgcacgcggcttcggctgcgggttgctgctggcggcccgcctgccctga

SEQ ID NO: 263 - DNA, 1035 bp, Ralstonia solanacearum
atgacgcgtttcgttcaactgcatgcactggtgtcctatccgccggccaatctcaaccgagacgatctcgggcagcccaagacggccaggatgggcggtgtgcagcgcttgcgcgtgtcgtcgcagagcctgaagcgggcatggcggacttccgatctgtttcagcagcaactggcgggcagcatcggtacgcgcaccaagcggttgggccacgatgtgttcgatgcactgaaggcggccggtgtggccgacaagcaagcgacggagtgggcgtcgcaggtggcccaggtgtacggcaaggtcaagaaagaatcgccgatcgagattgagcagctggtgcacgtggcaccggaagagcggcggacgctcgaggcgctggccgccaagcttgccgccgacaagcgggcgcctacggaagaggagttgaacgcgctgttgcatgaccataccgccgtggatatcgccatgttcggccgcatgctggcggccaagacggagcataacgaagaggccgcggtgcaggtggcgcacgccatcggcgtgcacgcctcggccatcgaggacgactacttcacggcggtggatgatctgaacaatgacgactccggtgccggacacgtcggtgaggcggggttcgccgccgccgtgttctatctgtacgtgtgcattgaccgcgatcgcctcaagcagaacctgggcggtgatgacgtgctcacgcagaaggcgctgcgcgcgttggcacaggcggtgctgacggtggggcccaacggcaagcagaacagcttcgccagccgcacctatgcgcattttgccgtggcggagaaggggagccagcagccgcgctcgctgtcgctggccttcgtcaagcccgttgatggcaatgattacgcggcggatgccgtgacggcgttcaagcgcgtgcaagacaacatggacaaggtgtatggcccctgcgcggatacgcgctgcaatctggatgtgctggcgggcgagggaagcctgccggccttgctggattttgttgcggcggagtag

SEQ ID NO: 264 - DNA, 1569 bp, Ralstonia solanacearum
atgaacctactcaccactccatggttgacggtcctgaggcaggacggtagcgaagacgttatcgccgccaacgccatgacatccggtagcccaccggtggatctgttggcggtgcggccggattttcgcggcgcgctctatcaattcctgatcggtttactgcaaacggcctacgcgccggtcgaccaggatgaatggcgcgagcgttggcaccagcctcccgatcttgccgcgctgaaggcggcctttgcgccgtacctcgacgcattcgagctggtcggcaagggctctgccttcatgcaggatttcgatctgccgggagcggaacagaccgaagtggcggcgctgctgatcgacgcgccgggcggcaagactgtccgcgacaatctcgaccatttcgtgcatcgcggcgaggttgaggcgttgtgtccggcttgcgcggcgactgcgctgttcacgttgcaaatcaacgcgccggccggcggcgtggggcaccgggtgtcggtgcggggcggcgggccgctgacgacgctgttgttgcccgccgacccggcggccacgctgtggcaaaagctctggttgaacgtgatgcccgcagacgctttggcatatccgcccgtcaagcagcgcggcggtgtgctgccatggacggtaccgacccgcacgagcgacgccaggggtgtgggcgataccacaccggaaagtgtccatgccatgcaggcgtactggagcatgccgcgccgaatccggctggattggagcgaagctgacggtgcgtgctgcgacctctgcggtgcggcatcggacacgctggtgcgccattaccgcacgcgcaactacggaaccaactacaccggcgcctggctgcatccgctcacgccctacagccttgacccaaagggcgcgaatccgccgctttccatcaaaggccagcggggtggtgtgggctaccgccactggctgggtctggtgctgggcaacgacgatcaccagcccgatgccgcgcaggtcgtgcgccacttccaggcccgtgtgcgcgtgcccggcgtgcgcctgtggtgcttcggctacgacatggacaacatgaaggcccgctgctggtacgacgccacgctgcccgtacacgccgtcgcgcccaaacagcagcttgagttggcggttgcggtgaaggcatggctggacgtggcgaaagaggcggcagacctgcttcacaaatgggtgcgggcggcatggttcgagcggcccggggatgccggcccggcgccatcggtgccgcagagcttctggcagcagtccgagccggcgttctatacgttgctggatcaggtggcaacagtcgacctgtccgacgaggttgcgcttgcgccattgcatcgggactggctgcgtgtatcccatgggctggccctgcggctgttcgatgactgggtgctggccgcgcccatcgaaggcatgaacgtcgagcgcgtcgtgactgcgcgcagcggtctgagcaaaggcctcaacacagccaagccgatgaagcagctctggcagatcgtcaaaacctatgaaaaggaggccgcgtga

SEQ ID NO: 265 - DNA, 600 bp, Ralstonia solanacearum
gtgagcctgcataagcactatctggatgacgcgcagcgcaagtgggtacgaagctggtggcaggctctgcaaccgcgcgaaggcacgtccaccgtgccgggcgcgctggccctgctgggccgtggcgatcgcgccgggctcaagcgctgcggtggcatggctgaactgctgaccgagggtgcgacgttccagctcgcggagcgattgctgtcgctggagtccgccaaggagcgcgcgcgttttgccgatgattacgatgcggttgtcctggttgccggcgtgctctcgcatgtttcgcaagacagagcgaacggcaagagcgtgattgccgggttggggcgctccgggcgcgatgcgacgcccaagctaagcgaaatacgtttccggcgccttctgcaagggcgtgacctggacgatttttaccgccaactggtgcgcgtggtgcagcttgccgagcgcaccgcagacgtggcgcaactggcggacgatgcgctcgcctggtgccgcgagcgcagccatgccaccgtcacacccagccacggcgtgcgctttcgctgggcgcgcgactactacctcgcttccgccgaatccgctgaataa

SEQ ID NO: 266 - DNA, 2733 bp, Ralstonia solanacearum
atggaaaaaggggcggcgcgatactttgcttattggggcaaggcacgcatgcaggaaggtgccagtcagctttatcacctccttgtctttcatgcattggatgtcgccgcttgcggcgcggagttgctgcgcctgccccggttttctcttgcgcccctggctgcggaactcggttggccattgcggattgtcgaaaagatattcatctggtttctggcgctgcacgatcttggcaagtttgcgcgcgcttttcaaaatctggcgccggggttatcgaccgatctcgtctcccctgatcagacaaaacggtatttacggcggcatgacacgctaggctggttgctgtggcaggagcgtgccgcgtgtctgggggcaagccttcccgacccggttcacggcttctgggccgcgtgggtacaaacggcggtcggccaccatggcatgcctcctcaagagacggcagggggcggcctgctaccgctgcaattgcacacgttctatctgccggaagacatggacgcggcggtcgcgtttgccaacgccgtcgcccctttcctgctgccaagcgatattccggtcccgggccgggcgcagcggcagacgctcctccggcatgcgtggcgtttggccggcctggccgtgctggcggactggctgggctccaaccaggaacattttcgctattgcgtgcatccgcaagacttgtctgcgtattggtgtgaggtggcgcagccggcggccgcccgggcggttcgcctggcgggattgtccgaccaggctgtcagcccctggcaaggctcgcaggcgttgtttccttacctggtgtcgtcgacacctttgcagcgatacgcggagattgtgccgctcgcgcaggggccgcaattgtttctgctggaggatgtgaccggcgccggcaagaccgaggcggccatgatgctcgcgcatcgcctgatggcggcgggccacgcgcatggcatctatttcgcgctgccgagcatggccacggccaatcagatctaccggcggaccgctgcgatgtaccggcgtctctatcaggcggggacggtgccatcgctggtgttgtcgcatggtgcgcggcagctcgtcgacgatttctggcgcagcgtgctggagccccaggcccatgacgacgatttcggatacggccgggaagaatccagcgccagcgcgcaatgcagcgcatggctggcagacaatcgcaagaaagccttgctggccgacatgggtgtcggtacggtggatcaggccttgctcgccgtgctgccggcccggcaccaggcgctgcgtttgctggggttgtccggcaaggtactgctggtggacgaggtgcatgcctacgacccgtacatgcacacgctgctgtgcaggctgctgacggcgcatgcgcgacagggcggcagcgtgctgctgctgtccgccacgctgccgacgggcatgcgcgctgaattgatcgcggcgttccaggtggggtgcggccgcgagggggcggaacccgcagcggatacgcgctacccgttggccacccacgtgcatgccgaggtgtccacccacgcctgcgcgacgcgtccgcaactggtgcgcaaggtggccgtggcaccgtttcatgccgagcaagcggcggtcgagcgcgtcatcgccgaagcccgggcgggccgctgtatctgctggattcgcaatacggtcgatgacgcgcggcatgctttcattgcgttgcaagcgcatctgccggagccatccctcgcactgttccatagccgttttgccatgggcgaccgattggcgatcgaggcagcggcgctggaccgctttggcaaggcttcgacggcggcgcagcggcgcgggcgggtgttgatcgccacgcaggttgtcgagcaatcgctcgatctggatttcgacatcatgatcagcgatcttgctcccatcgatctgctgatccagcgtgccggccgtttgcagcgtcatgcccggcacggcgatggcgaacccgccacggatggctgcgagcgtcgccccgcgcccaccctgtatctgctctgcccagagaacacggacacgcccgccagcgattggtatgcggcgttgtttcccaaggcgcgccatgtgtatcccgatgtcggcaagctctggctgacgcagcgcgccctgctggcggccgggcacattgtcagccccggcgggccgggagaagacggcgccgtccgcagcctggtcgaggccgtctatggagcggaggccgattccattccggacgcattgcaacctgccacgcaagaacgggagggcaaggacatggccgccgtcagccaggcccacttcaatgcactcaaccttgagcggggctattgcaccgacagcagccgccattggtacgaagacacgcaaacgcccacgcgcctgggtgacgagacttgcgagatttacctcgcgcgcgaagagggcggtgggttggtgccttttgtcgcggcgtcggattttccgtgggagcacgcagccgtgcgcgtgcgtgccggcacggtgggcacgctgtctgactgctggcaggcaaagtttggtccggctatcgacgcgctgcgcaagcgccatcgcctgcttgccgaccccgctttggtgctgccgctagcctgggaagacgggcggtgggtcggctattgtgaacgcaacggaaaagcccagcggatcgaatatgacgatgtgctgggattacaggtgtga

SEQ ID NO: 267 - protein, 238 aa, Streptococcus mutans
MKTILLKFAGPLQSWGTSSHFETRHTDFYPSKSAVIGVIAASLGYRRNEDEKIRKLNELDFAVRVDQQGNLLRDWHNAKSDKRKDPYTTNRYYLEDAVFVVAISHQNHAFMKMIEDGLRSPYFQSFMGRRACPLPVDFIIQVTNDSALDSLKQLDWQASAWYMKRESSDNWISLEIYTDSYLTGKESYQLRQDKVLSFSQKERKFGFRYESRVRVEVLNPLWQEQSSTEHDIFNSIGD

SEQ ID NO: 268 - protein, 213 aa, Streptococcus mutans
MYISRVEIDMNNRRRMKNLTHVGAFHDWVERSFPNEIEKQIRTRKLWRIDTLQGKNYLVIISSGKPDLLLLEKYGVEGSAQTKLYDNCLNTLKKGNRMKFRVALNPVISLPSSDNKKRGIVKPHVTSEYQMKYLKDRSEKNGFLLDEAEFLIVERGYEVFKKAKPKPIRLIKTVYEGTLTISDVDRFRKVLTEGIGKKKAYGFGLMTVIPAGD

SEQ ID NO: 269 - protein, 359 aa, Streptococcus mutans
MTISNNQDRLFLDIYAIQTLPPSNINRDDTGSPKTTQYGGVRRARVSSQSWKKAMRDYFYEHAEEEQLGKRTRKVVNYVAEKIIHQKIDLNEKESSKLATDILKLAGVPTDGKVLFFIGNTEAEKLATAAVKGVKDKEEARKIMQSNLALDVALFGRMVANDKEIEADASSQFAHPISTHAVQTEFDFYTAVDDLASDDDAKAGMLGTVEFNSSTLYRYANVAIHEFLVQRGNREDLVDSLKLFIKAFAESMPRGKINSFANQTIPQTLIITVRSDRPVNLVSAFEEPVKSSNGYVTKSIEKLSKEFAKVEKMVKKPVLSFYVSLEEVEALAKVGTEKNSITELVEDFSQELSDLIQNR

SEQ ID NO: 270 - protein, 572 aa, Streptococcus mutans
MSRFNLLDEPWISVVFDEKCSTKEVSLLDFFQNAHHYKDLAGDTKTQDFAVLRVLLAVLHTVFSRFDANGNVYGYLEIDEKYRQIEEIEEDDLEEYEDDLYETWLTLWQNRQFPDIIEEYLKKWRDRFYLFDEEYPFFQVRKEDIEMVMDLNKDAGKIFGKNINRLVSESSNKIALFSPKHNYDNNKERLSNSEIVRWLLTYHGYSETGGRMKKIGKRDYSKGWLYNLGGLFLKGKNLYETLLLNLTLFYFEYDNHLHIQKPCWEFDSAVIIDSYVSRKRIDNLASLYTSWSKEVYIDPHVVQPEFECRVAKIPAISPNDLFLEPMTLWKYEENSFQPQSHYTNQSLWRSFGLITMGGMEKLNHIPGIIDWQRTIKDNIENASINICSVGMVSDKTANNTPIIEVFDTLSINEFVLTDIQKDGWVIRINDEVDRVKKVISHTYAYFVKDVIVIRKHIEEKEIPKLKKSILRGSLFRQDYEKQISNRIEELYFKIDQPFRQWLSNIQPGDDKDSKILEWREILEKIVLKEAKSLLYEGNPRDYIGWSYGEPKTFHNIATAYESFTYWLNKNLK

SEQ ID NO: 271 - protein, 200 aa, Streptococcus mutans
MSEQSKPTVSSVTRKILMKLSNQIDTSPGKAVLAKIRHSIGKPINKATEIWSLLFENLPEEFLGKSGRASYEETVILITVQLYALYQQGLSHSVLVEDVEKYHNIGSSLRQLRKGDDTTAIDRRFNVMITSSTFEELTYHLRHLVKLLKSRSPETKIDFAKLSQNLYWFLRDSQETVRLDWAREYYKQDNKGEKDNDNIQ

SEQ ID NO: 272 - protein, 928 aa, Streptococcus mutans
MDKKVLRYNFWAKKREEKGQFLWLPLMQHLEDTKNVAGLLWEHWLGEGQKALIIASLKTGKKDEKTAKQLAQFLAAVHDIGKATPVFQSKKGYANSKDLDLELLEKLERAGFEGISSITLANPEKSPHALAGQYILHYNKVKEDIATIVGGHHGKPVDDRATYKNQRSQESNYYQSGKSGNTIYQKWERAQEEILNWALEVSGFKSVDELPTIKQPAQVILSGLLIMADWIASNEDYFPLISIDEREVENKADRLSGFEKWKRSSLWVSRNTWDFEGLYQARFDFEPRDVQAVLSKTIADTEQPGIFILEAPMGIGKTEAALVATEQLAEKTDRNGIFFGLPTQATSNGIFPRIEKWLESIKEDLDDNISIQLVHGKAALNADFSELPKGISINIDDFENGSVIVNEWFSGRKTAVLDDFVVGTVDQFLMLALKQKHLALRHLGFSKKVVVIDEVHAYDAYMNQYLLEALRWMGAYGVPVIILSATLPAERREKLLKSYMFGMGKRFEEKEKEQLSKQLKTEAYPLITYNNGFDICQITEFKKGENKKILLSQLEEEDLLDTVKGLLSDGGVAGIIVNTVKRAQKIAKVFADSLGEDMVEIFHSGFIATERVRKEQELLKMIGKDANRPYRKIIIGTQVIEQSLDIDFDVMISDLAPMDLLIQRMGRLHRHKIDRPQKHVFPKFYVIGMNDDLKFEEGSSFVYGDYLLARTQYYLPDSINLPEDISILVQKVYDEKLELDYPTELLDKKYHNAKSEHETKIGNKESKARDYRIADPVLRETRSRKENLIGWLENSHPDDSDERAYAQVRDIEDIVEVIALKKVGDGYALFGEGEDLSELITDFNIAKKVAQNTLRLPIALTKSYNVDDTIKELEMYSRMNLNNWQDSSWFKGALGIIFDENNEFLIGGYKLVYDEKYGVRMEEIENHE

SEQ ID NO: 273 - protein, 239 aa, Peptostreptococcus anaerobius
MKTIVMKFSGPLQSWGTGSNFETRHTDFYPSKSAVIGMISAGFGYRRDDDIAIRRLNELSFGVRIDQRGSLLRDYHIAQKYKINGNFERTYVTNRYYIEDAVFIVAISHEDDSFMEEIYKALEYPYFQHFMGRRSLPLGYDFIQGMFDNDIVNCLESHEWMASSWYKKKYRNDKFVGLEIYADSDLIDDNSHILRKDRPISFSQKNRRFGFRYESRKWVHVVNDRYVESDSKHDVFGAV

SEQ ID NO: 274 - protein, 211 aa, Peptostreptococcus anaerobius
MYISRVEIDSDNRRKIKNLSHVAAYHSWVEDCFPIEKDEGIRTRKLWRVDRLNGRTYLLLVSENKPDLLGLEKYGVEGSAQTKSYDEFLEEIKEGSVMKFRVVLNPVVALSQGTGNKNKIKPHVTVEQQMKYLLDRSSKNGFELEESNFSIVERGYENFYKDGQKKVRLIKAVYEGVLTVSNKELFNRILTEGIGKKRAYGFGLMTVIPVV

SEQ ID NO: 275 - protein, 358 aa, Peptostreptococcus anaerobius
MRNEQRLFIDIHVVQTLPPSNINRDDTGAPKTAQFGGVKRARVSSQSWKRAIRMYFQNNGDRVDFGVRTHSIVDYVAKKIIEKDSSISYEESMKKSEKVINDVITKTTKDMKLKALFFLGDFQANMLADAIIKGVNDKKQLKEILKNNPSIDIALFGRMVADDPSLNEDASSQVAHAISTHAIQNEFDFYTAVDDLHSDDNAGAGMLGNIEFNSSTLYRYANIAVHELSKQLDNKEAVINTVKLFIEAFSNSLPTGKVNTFANQTIPNAIIVTVRDDRPINMVGAFEEPIRSNGGFASKSIEKLAEEMKKSEKFVKKPIKSLYVSMEQISSMNDVSEEAGCLHDLLEEIANELDKKLI

SEQ ID NO: 276 - protein, 581 aa, Peptostreptococcus anaerobius
MGRYNLLDEPWISVIIDKKGNSKNVSMIDFFKHAHEYLDMGGDTKTQDFAVMRVMIAVIHTVFSRVDVSGEPYEYFDIDERFRQKELIDEYDVDDYEGDLIGTWIDIWKMKKFPDVVIEYLEAWRDRFYLFDDKYPFFQVTKEDIEQADSDKENPGEFFGKNINRKISQSGNKTSLFSPKYEKENNRDILDEDEIARWLLTLQGYVGQSDKVRFKVKKEYLIEEKYKAANGWLFDLGGIYIRGQNIFETIMLNCVLANKNQNNLMNRQTPCWELENRALLKKYLNSAGDIYDNEVSLLTAWSRAVFIDPDTDAKKPFVCGIVKLPDVDHRNKIIEQMTIWNYNEKGKYKNTFTPRKHQSNKSIWRSFGLISGNVESGEDKKYLKPGVIEWLNDISSVMSTDIFIDNMLNICSVSMKDNGHQASMVPVDEIVDDLFISEKVFLDKEWVVRINETIEKTKTIVRSAFSEFIEDIREIRNINDRDFTYKKIEELYYSIDFIFRDWLLGLKLDDEKEEKIFEWNRILRKIVIDEANKVVKNANNRDFKGKKVDDGMKNIATAYNYFIYSLNHKIKIKKEAAHEEK

SEQ ID NO: 277 - protein, 193 aa, Peptostreptococcus anaerobius
MKKNSIYSVTSSIIYKLNALSEISSGKSYLAKLRNSIGKDISSSSEVWSILFENLPEEFLGDENRITTEERVITLTLQLFALMNQGSNRISVNPDDENKYKNIGYSIRVLRDEHGESVDRRFNALLTSSDVDELSTHLRYLLNLLKAKTTGTYVNFPKLAEDMYWYSKGYGDSVKLSWAREYYRKKIEFDNEK

SEQ ID NO: 278 - protein, 925 aa, Peptostreptococcus anaerobius
MIVIKRIKYLWAKKSQKNGRFLWLPLMQHLEDTKNVSLLLWENWLSEGQKKIIINSIVDKDEKKAKQLVKFLGYVHDIGKATPSFQTMEGFTNSSDLDYELLSKLEYAGFKGITSKTFASRSKTRHNIAGQFILSNFGVRDEIATIVGGHHGKTIDNINECMNQSAYKANYYQDEGNTGVNALWHQCHYEIFNEALNLCGYGSVDEISAVGQPAQVILLGLLVVADWIASNEEYYPLIDISKDEVEDKDHRRSCGFKEWIKSDLWQPDENVDFVSMYNNRFDFDPRNVQEKLSEVITECDEPGIFILEAPMGIGKTEAALIGSEQLAAKTGRSGLFFGLPTQATSNGIFPRIITWLNSIKEDYGDTLQVRLAHGKAHLNDSFTSIASGIGIDGDGSIIVNQWFSGKKTTALDDFVVGTVDQFLLLSLKQKHLFLRHLGFSKKVVIIDEVHAYDAYMSQYLKESLTWMASYGVPVILLSATLPSKSRSEIILSYLMGRSTKISKPEREEVKVKLENRAYPLITYTDGNNVKTETQFVPIENKMVKVNSIDEDGLIQLVESMIKDGGVVGIIVNTVKRGQNFAKMLSDYFGDDLVLLLHSGFIATERVKKENELLSIIGKKASRPERKIIIGTQVIEQSLDIDFDVLISDLAPVDLLIQRIGRLHRHDERIKPASHTNPRLYILGKNSQYDFEEGSRNVYGDYLLMRTQYFIDKYSEIAIPGDISDLVQDVYSDDDIDFSGELKERYTLYKENNKELKQHKENIANTFRIDNPIVSQNKKRIVKKNNLIGWINKGIMDNSDEKGFAQVRDGEQTIEVIVVKKIGDGYGVFDSDEDISKKINDEIVAKNIARNTLTLPRFFSAVYNIDKTIDELEKYNNKNLSKWQKSIWLKGCLGIVLDENNEFVLCGKCIKYDEKYGICILEEGSD

SEQ ID NO: 279 - protein, 291 aa, Gardnerella vaginalis
MKSLLLKFSGPLQSWGTDSHFETRHTDYYPSKSAVVGMIAAAFGYRRSADCDEEIAKLNDLDFAVRIDQQGNLLRDYHIAAKYKSNGDFEKNYVTNRYYLEDAIFLVAIGSDNEQLIYSINDALRSPYFQSSLGRRSLPPTADFILGVEDCGVIQALLTHEWLANKWSKKRFNTFRLSDSSESADESCNEVFISLYADSDLVDKAAAELVKDDTSTYKIQGSVRRLRKDFVNSFSNKERKFGFRYESKVEIPIKRILHNNSDSEGISSDSKHVKSTGDFIAEHDAFSGLES

SEQ ID NO: 280 - protein, 215 aa, Gardnerella vaginalis
MSYLSRVEIDYKKPSSLRDLKSVGAFHNWVEQSFPDEWENHERSRKLWRVDVLHGKHYLLIVSDSEPDLQRLEMYGVAGTASSKNYDKFLGSLMNGMRMQFRVTLNPVVSISDTAETRTTRGRVVPHVTYDQQMNFLLNRAQKLGFSLNENEFAIVERGYSLFTKSEKPIRLSKAVYQGILTISDAKIMRKTLLEGIGKKKAYGFGMMTVIPLDN

SEQ ID NO: 281 - protein, 362 aa, Gardnerella vaginalis
MNAHLFLDIQAIQTVPPCNINRDDAGSPKTAQYGGVTRTRISSQCWKHSMREYFKEHSGDSNVGIRSKNIVKYVADKIITLKPELSEQEALDLADKTLNTAGVKTKTDKGETVPTSKALFFLGETQANSLAQAAINNVTDKKQLQEILRDNPPIDIALFGRMLADDPSLNEDASSQVAHAISTHAVRTEFDYYTAVDDLSADDNAGAGMLGTIEYNSSTLYRYANVAVHEFSHQLSDNKESTINALRLFIEAFANAMPTGKTNTFANQTLPQMLVVTLRDDRPVNLVSAFEDPVKSKDGYVSKSIDKLSQEYEKVQKFVHKPLASFYVTMDSSNENLKLGVEEQSMQQLLDDFSSKVPEFLQ

SEQ ID NO: 282 - protein, 556 aa, Gardnerella vaginalis
MSRFNLLDEPWISVIVDEKGHNKLVSITDVFKHASEYKALAGDMKTQDFALLRVLLAAIHTVFSRYYIQGNSREFDSGEDSEDDFNEETMDIWREVWNSKKFPDAVFKYLEQWHDHFYLFDDKYPFFQVLKQDIDSKKLGGKSPSEISGKNINRLISESNNKIAVFSPKDNVDNNKSSLTEPQLARWIITLQSYAGLADKTMFGTEKYKASKGWLFDLGGIEIIGANLFETLMLNCVLVGDVQSPEKKQKPCWEYSGTENIENSFYETFIDNVSQLYTRWSRAIYINPDISIDKPISVSIVKLPDINHKNAFIEPMTVWQYNKEGENKDKYTPRKHRTEEAMWRSFGLLTSQELYDGSVKNHKPGIMEWLNEIKHDIAGSSISLQAISMKDDGNATSWVPTDEICDTLYIDEVVVTDNADDGWVYRINNEVEYTRSAIGFIYKQFLLDICEIRNRSKDDATKYSAKYISQAYFLVDQPFREWLANIKPKDSMNERCTQWRNTLHNILIDEAKGMLENATLRDFTGRPSDQSEKESTKNIVTAYNVFTSRLKKLSGK

SEQ ID NO: 283 - protein, 204 aa, Gardnerella vaginalis
MAENQSKSVEVSSVVSKIINQFLNGSDIASRRTMLAQLRHTIGKPLSQSIEIWPWILNNVPESFIDKYGEVNYQLRAVINTLQIYALYEQGVAEKSSYKDLNKSEDSENEKSYNNMGTALRTLRSDEGVRGAMDRRFSVMITANDYESFYYYLRQLVRLLKSRTKENQQSIDYSKLARDLYLLQFEDSEKVRLSWAQEYYRLSK

SEQ ID NO: 284 - protein, 951 aa, Gardnerella vaginalis
MSCNHVVNTELWGKKREVNGVMQWLPLAQHLEDTGNVIGQLWDHWLSDGQRRLIESSLSKRVDAKKLSQFLGCIHDIGKATPVFQFRKSYSNSKDLDIALKNKLATVGFTNINDFIIKAEDWSSSHHTITGQAILSNTGVPEGICAIVGAHHGKPLDNDSVYKSNESAYTDHYYQSETESENSKLWQKLQNDILDWALERNDFSNVDDLPEISEPAQVLLCGLVIMADWIASNEQYFPLIPIEKDLIENQEERYRKGWEKWLQHGSKDVWESLNCCSNISQIYKHRFGFLPNSIQTALYNVISHCKEPGIFILESSMGSGKTEASLIAAEQLANLTGRSGVFFGLPTQATSNGMFRRVEDWLKSVNSDFQGEIGLRLVHGKAELNADYAHLLHGMQNMNDGCESTSSSNDVNNNGVILNDWFTGRKTAMLDDFVVGTVDQFLLASLKQKHLMLRHLGLSKKVVIIDEVHAYDAYMNKYLEESLVWMAAYGVPVVLLSATLPAKRRKELIKAYMCGLFGFNWRECDKSNVDFETNNYPLITYSDKNCVKQKFIENDASDNKSVSVRKITDDSLHESLVNELKSLLNNGGIAGIIVNTVKRAQEIYNACVGEFTDEEVIVIHSQFIATDRVRKEQQICNMIGKNAHRPVRAIIIGTQVLEQSLDVDFDVLFTDLAPIDLLLQRAGRLHRHMIERPDSFKEPILYVLGTSERYEFEKASESIYSKYLLIRTQYYLPDVINMPQDISRLVQIVYGDNLLELQEDLKDAYAAAKREHDSVRNSNESAAKTYRIENPKSEIGKKSIVGLLKNSITNESDEFACAQVRNSGESIEVIAVKKVGSGYGTFHDCEDISQNIDYSEVAMRLAQETVGLPWMFTLNNNRIEETINELERIRKQKQFQNWDNQPWLRGSLVLLFDENNICEISKYRVVYSEKSGIVCIKSLEEDRKELKGEQV

SEQ ID NO: 285 - protein, 255 aa, Pseudomonas sp. S-6-2
MTDYLLLRLYGPLASWGEIAVGESRHSAVQPSRSALLGLLGAALGIERHDDAAQQALVDGYRFAIKLECIGSPLRDYHTVQVGVPPRKFQFRSRRQELAADKVDTILSTREYRCDSLALVAVEALPGAPVDLASLAEALRKPRFALYLGRKSCPLALPLSPKILAASSVREVFDNLELPSLLGLLDRYQPEQAWPSRQDQQALRPGVARYYWEDGMTAGMAPSFEAQRHDQPLSRRRWQFAPRREWVALNDGGQS

SEQ ID NO: 286 - protein, 220 aa, Pseudomonas sp. S-6-2
MSHYFSLVRLIGSPRHDAWLRDLSRHGEAYRDHALIWRLFPGDGAARDFVFRRLEDEKSFYVVSARPPQADAGLFHIQSKAYSPELAEGDWVRFDLRANPTVSVRRENGRSQRHDVLMHAKQLASTEKSALPERLEAAGREWLKDRAERWGLDLRTDSLMQNGYRQQRLKRKGKHIAFSTLDYQGIAQVTDPEQLRRALLDGVGHSKGFGCGLLLVKRVD

SEQ ID NO: 287 - protein, 344 aa, Pseudomonas sp. S-6-2
MTRFVQLHLLTSYPPANLNRDDLGNPKTARLGGVERLRVSSQSLKRAWRTSELFQQQLAGTIGTRTKRLGIEVFEALLGAGVTEKQAREWAGQIAKVYGAAKKDNPLEIEQLVHIAPEERASLDQLVATLAAEKRGPTDEELDALLHHQTAVDIAMFGRMLASKTQFNGEAAVQVAHAIGVHASAIEDDYFTAVDDLNRNDPGAAHIGESGFAAAVFYQYICIDRDLLKRNLGGDEVLTQKALRALTEAALKVGPSGKQNSFASRAFAHFALAEKGTDQPRSLSLAFVKPVAGTDYAGDAVAALQQVRDNMDKVYGVCAESRCQFNVLTGEGSVADLLDFVAAE

SEQ ID NO: 288 - protein, 517 aa, Pseudomonas sp. S-6-2
MDLLSDTWLQCRHRDGTLKPIAIGQIGLEDCLELVAPRPDFRGALYQFLIGLLQTAYAPEDLQEWRDRYANPPTADDLAEVFAPYRDAFQLENSGPTFMQDLTLPDDVNQLPVLELLIDAGSSSNQYFNKPAVEHGMCEGCFTQALLTMQLNAPSGGRGIRTSLRGGGPLTTLLVPAEQNATLWQKLWLNVLPLDALDHPPIKMLSDVLPWLAPTRTSDDKQGQDTPPESVHPLQAYWSMPRRIRLDAATLDQGDCAVCGAQNVKRIRHYRTRHGGTNYTGTWTHPLTPYSLDSKGEKPPLSIKGRQAGRGYRDWLGLVLGNEDHQPDAAQVVRHFTAKLGKPSVRLWCFGFDMSNMKALCWYDSLLPVHGVAPDVQRKFTRSVKQVLDSANDMASVLHKQVKAAWFRRPGDAGQEPAVTQSFWQGSETAFYQVLEQLSKLDFDSAAELAAIYRAWLQATRRLVLSLFDHWVLSGPLEDMDMQRVVKARADLAKELNTGKAQKPLWTIVNQHLKEQA

SEQ ID NO: 289 - protein, 213 aa, Pseudomonas sp. S-6-2
MKPRKPRLNEAQQRWVRDWWRALQPRAEGDEPIPGELSVMGRGERAQLRRCTDADELLTQSATLLLAHRLVALNGERGPLPDNSLSYERMAWVAGVLANVKDDLRDGKSLATHLGQAADAERPPMSELRFRAMQRGTAMQELFLHWRRALQLAGGKTDVAHLADDLLSWQIEQGQSAAQASNGVKFHWAYDYYLSARDRAAAKEPEFNKEISK

SEQ ID NO: 290 - protein, 911 aa, Pseudomonas sp. S-6-2
MPNQASYFSYWGKASPLSQAGERFHLLPFHCLDVAACGQALISLPSFSLKPLAEELGWTQPQVESLFTFFLTLHDLGKFARAFQGLVPDLSPDLVPAEPGKCYDRRHDTLGWLLWSQDLAADDPIDNLPQPEHEFWAVWVRSVVGHHGKPPEEVADAGLTALELTDFFLRADRRAAREFVQALAGWMLPADLPVPDREQLKILRRHAWRLAGLAVLADWLGSNQGYFPYRSLPMSLPEYWELARQQAEHAVIASGLRWQPLRPWSNPLELFDYLREPTPLQAYAATVPLEHGPQLFLLEDVTGAGKTEAALILAQRLMQANLAHGLYFALPSMATANQMYQRVGGVYRRLYEPQAKPSLILSHGARQLIEGFRQSILQSAEQAEDCRYQPDEGSASVQCNAWLADNRKKALLAEVGVGTLDQALLAVLPARHQSLRLLGLAGKVLLVDEVHAYDPYMMTVLKTLLIAHARQGGSVILLSATLPLAAREELLAAYRFGLGVTAETVVDDRRYPLATQAGKSLNSHACETRPQLRRSVAVRPLHDEASVVELIVAQARVGRCVCWIRNTVDDARRANQLLAEHLPEEQRILFHSRFAMGHRLDIEAQVLARFGKASTGQVRAGQVLVGTQVLEQSLDFDVDLMVSDLAPVDLLIQRAGRLQRHARQASGDLAVDAVERREPPVLYLLTPEPVENPPADWYASLFPKACYVYPDAGRLWLGARALLQAGCIVTPGEQGQTGAVRELVEAVYGSEVDDVPNALKKASQDQLGKDMAMQSQAHFNGLRLDKGYCIDSSARWYEDHAVPTRLGDETQALYLALWTDGELQPLCADAAYPWEESAVRIAAHRARELAPDWQQQFAAPLEQLRNRYRLLEEPAFILPLVTSGTALVGKVLDEKGRVLDMRYDRQQGLSW

SEQ ID NO: 291 - protein, 257 aa, Ralstonia solanacearum
MTEYLLFRLYGPLASWGEIAVGESRHSAMYPSKSALLGLLGAALGVRRDDDAGQQALARGYRFGVKLLTAGTPLRDYHTVQAPPQRRKTVYRTRRQELADTQALGTLLSAREYRCDSLALVAAEALPDAPHALDAVVEALRRPHFPLYLGRKSCPLALPLQPQLARAETLRAALDDARFPSPTALLSNHPERPWPTERDRHVFAFQPAAQRYYWEDGMHAGMEPALQLVRNDQPLSRRRWQFAPRREHAVLGTEAEA

SEQ ID NO: 292 - protein, 222 aa, Ralstonia solanacearum
MSHYFSRVRLQTRPRDMALLASLSRHGQAYRDHALIWRLFPGDGAERDFVFRRMQDDRGQTGYFVVSQRAPCAEPGLLDVQTKPYAPQLREGERIRFELRANPTVSRGTVGQRSRRHDVLMDARQHITDPHARQAAMDAAAIDWLIRRASDWGLTIAAECVLTSGYAQHRLRRKGQPIAFSSLDYQGVAQVADTGRLTQALLHGVGHARGFGCGLLLAARLP

SEQ ID NO: 293 - protein, 344 aa, Ralstonia solanacearum
MTRFVQLHALVSYPPANLNRDDLGQPKTARMGGVQRLRVSSQSLKRAWRTSDLFQQQLAGSIGTRTKRLGHDVFDALKAAGVADKQATEWASQVAQVYGKVKKESPIEIEQLVHVAPEERRTLEALAAKLAADKRAPTEEELNALLHDHTAVDIAMFGRMLAAKTEHNEEAAVQVAHAIGVHASAIEDDYFTAVDDLNNDDSGAGHVGEAGFAAAVFYLYVCIDRDRLKQNLGGDDVLTQKALRALAQAVLTVGPNGKQNSFASRTYAHFAVAEKGSQQPRSLSLAFVKPVDGNDYAADAVTAFKRVQDNMDKVYGPCADTRCNLDVLAGEGSLPALLDFVAAE

SEQ ID NO: 294 - protein, 522 aa, Ralstonia solanacearum
MNLLTTPWLTVLRQDGSEDVIAANAMTSGSPPVDLLAVRPDFRGALYQFLIGLLQTAYAPVDQDEWRERWHQPPDLAALKAAFAPYLDAFELVGKGSAFMQDFDLPGAEQTEVAALLIDAPGGKTVRDNLDHFVHRGEVEALCPACAATALFTLQINAPAGGVGHRVSVRGGGPLTTLLLPADPAATLWQKLWLNVMPADALAYPPVKQRGGVLPWTVPTRTSDARGVGDTTPESVHAMQAYWSMPRRIRLDWSEADGACCDLCGAASDTLVRHYRTRNYGTNYTGAWLHPLTPYSLDPKGANPPLSIKGQRGGVGYRHWLGLVLGNDDHQPDAAQVVRHFQARVRVPGVRLWCFGYDMDNMKARCWYDATLPVHAVAPKQQLELAVAVKAWLDVAKEAADLLHKWVRAAWFERPGDAGPAPSVPQSFWQQSEPAFYTLLDQVATVDLSDEVALAPLHRDWLRVSHGLALRLFDDWVLAAPIEGMNVERVVTARSGLSKGLNTAKPMKQLWQIVKTYEKEAA

SEQ ID NO: 295 - protein, 199 aa, Ralstonia solanacearum
MSLHKHYLDDAQRKWVRSWWQALQPREGTSTVPGALALLGRGDRAGLKRCGGMAELLTEGATFQLAERLLSLESAKERARFADDYDAVVLVAGVLSHVSQDRANGKSVIAGLGRSGRDATPKLSEIRFRRLLQGRDLDDFYRQLVRVVQLAERTADVAQLADDALAWCRERSHATVTPSHGVRFRWARDYYLASAESAE

SEQ ID NO: 296 - protein, 910 aa, Ralstonia solanacearum
MEKGAARYFAYWGKARMQEGASQLYHLLVFHALDVAACGAELLRLPRFSLAPLAAELGWPLRIVEKIFIWFLALHDLGKFARAFQNLAPGLSTDLVSPDQTKRYLRRHDTLGWLLWQERAACLGASLPDPVHGFWAAWVQTAVGHHGMPPQETAGGGLLPLQLHTFYLPEDMDAAVAFANAVAPFLLPSDIPVPGRAQRQTLLRHAWRLAGLAVLADWLGSNQEHFRYCVHPQDLSAYWCEVAQPAAARAVRLAGLSDQAVSPWQGSQALFPYLVSSTPLQRYAEIVPLAQGPQLFLLEDVTGAGKTEAAMMLAHRLMAAGHAHGIYFALPSMATANQIYRRTAAMYRRLYQAGTVPSLVLSHGARQLVDDFWRSVLEPQAHDDDFGYGREESSASAQCSAWLADNRKKALLADMGVGTVDQALLAVLPARHQALRLLGLSGKVLLVDEVHAYDPYMHTLLCRLLTAHARQGGSVLLLSATLPTGMRAELIAAFQVGCGREGAEPAADTRYPLATHVHAEVSTHACATRPQLVRKVAVAPFHAEQAAVERVIAEARAGRCICWIRNTVDDARHAFIALQAHLPEPSLALFHSRFAMGDRLAIEAAALDRFGKASTAAQRRGRVLIATQVVEQSLDLDFDIMISDLAPIDLLIQRAGRLQRHARHGDGEPATDGCERRPAPTLYLLCPENTDTPASDWYAALFPKARHVYPDVGKLWLTQRALLAAGHIVSPGGPGEDGAVRSLVEAVYGAEADSIPDALQPATQEREGKDMAAVSQAHFNALNLERGYCTDSSRHWYEDTQTPTRLGDETCEIYLAREEGGGLVPFVAASDFPWEHAAVRVRAGTVGTLSDCWQAKFGPAIDALRKRHRLLADPALVLPLAWEDGRWVGYCERNGKAQRIEYDDVLGLQV
